(19) United States
(12) Patent Application Publication
(10) Pub. No.: US 2009/0298054 A1
(43) Pub. Date: Dec. 3, 2009

(54) Epigenetic methods and nucleic acids for the detection of breast cell proliferative disorders

(75) Inventors: Ralf Lesche, Berlin (DE); Anne Fassbender, Berlin (DE); Klaus Juenemann, Muenchen (DE); John Foekens, Rotterdam (NL); John W. Martens, Rotterdam (NL)

Correspondence Address: DAVIS WRIGHT TREMAINE, LLP/Seattle, 1201 Third Avenue, Suite 2200, SEATTLE, WA, 98101-3045, US

(73) Assignee: Epigenomics AG, Berlin (DE)

(21) Appl. No.: 11/632,824

(22) PCT Filed: Jul. 18, 2005
(86) PCT No.: PCT/EP05/07830

§ 371 Date: Jan. 19, 2007

(30) Foreign Application Priority Data
Jul. 18, 2004 (EP) 04016926.0

(51) Int. Cl. C12Q 1/68; C07H 21/04

(52) U.S. Cl. 435/6; 536/23.5

(57) ABSTRACT

The present application provides methods and nucleic acids for the detection and differentiation of breast cell proliferative disorders. This is achieved by the analysis of the methylation of a panel of genes, or subsets thereof. The invention may be used for the detection and/or differentiation of a variety of tissue types including breast cancer and benign breast disorders as well as other cancers and tissue types.

### FIELD OF THE INVENTION

[0001] The present invention relates to genomic DNA sequences that exhibit altered CpG methylation patterns in disease states relative to normal. Particular embodiments provide methods, nucleic acids, nucleic acid arrays and kits useful for detecting, or for detecting and differentiating between or among breast cell proliferative disorders.

### BACKGROUND

[0002] The etiology of pathogenic states is known to involve modified methylation patterns of individual genes or of the genome. 5-methylcytosine, in the context of CpG dinucleotide sequences, is the most frequent covalently modified base in the DNA of eukaryotic cells, and plays a role in the regulation of transcription, genetic imprinting, and tumorigenesis. The identification and quantification of 5-methylcytosine sites in a specific specimen, or between or among a plurality of specimens, is thus of considerable interest, not only in research, but particularly for the molecular diagnoses of various diseases.

[0003] Correlation of aberrant DNA methylation with cancer. Aberrant DNA methylation within CpG ‘islands’ is characterized by hyper- or hypomethylation of CpG dinucleotide sequences leading to abrogation or over-expression of a broad spectrum of genes, and is among the earliest and most common alterations found in, and correlated with human malignancies. Additionally, abnormal methylation has been shown to occur in CpG-rich regulatory elements in intronic and coding parts of genes for certain tumors. In colon cancer, for example, aberrant DNA methylation constitutes one of the most prominent alterations and inactivates many tumor suppressor genes such as p14ARF, p16INK4a, THBS1, MINT2, and MINT31 and DNA mismatch repair genes such as hMLH1.

[0004] In contrast to the specific hypermethylation of tumor suppressor genes, an overall hypomethylation of DNA an be observed in tumor cells. This decrease in global methylation can be detected early, far before the development of frank tumor formation. A correlation between hypomethylation and increased gene expression has been determined for many oncogenes.

[0005] Breast cancer. In American women, breast cancer is the most frequently diagnosed cancer. 1 out of 8 women will develop breast cancer during her life time. Breast cancer is the second leading cause of cancer death and in women aged 40-55, breast cancer is the leading cause of death. For 2004, 215990 new cases of breast cancer and 40110 deaths are estimated in the US alone with comparable numbers in Europe.

### Breast Cancer Classification.

### 1. Breast Cancer

[0006] The vast majority of breast neoplasms are of epithelial origin with ductal carcinomas representing 80% of all tumors. In addition, there are several breast cancer subtypes that are less common. Medullary and lobular carcinomas are both found in about 5% of patients diagnosed with breast cancer. Other less frequent tumor histologies include pure tubular carcinoma, mucinous or colloid carcinoma, papillary carcinoma, and Paget's disease. These cancers have substantially better prognoses, especially when found in a node-negative stage. Carcinocarcinomas and adenocystic tumors occur only sporadically.

[0007] Ductal carcinoma in-situ (DCIS) is a noninvasive, precancerous condition. DCIS can progress to become invasive cancer, but estimates of the likelihood of this vary widely. Some people include DCIS in breast cancer statistics. The frequency of the diagnosis of DCIS has increased markedly in the United States since the widespread use of screening mammography. In 1998, DCIS accounted for about 18% of all newly-diagnosed invasive plus noninvasive breast tumors in the United States. Very few cases of DCIS present as a palpable mass; 80% are diagnosed by mammography alone.

### 2. Benign Breast Conditions

[0008] The most common benign breast conditions include fibrocystic breast condition, benign breast tumors, and breast inflammation. Fibrocystic disease is the most frequent benign breast condition affecting every second woman at least once during her life time. Symptoms of fibrocystic breasts in the breast include cysts (accumulated packets of fluid), fibrosis (formation of scar-like connective tissue), lumpiness, areas of thickening, tenderness, or breast pain. Fibrocystic breasts can sometimes make breast cancer more difficult to detect with mammography.

[0009] Fibroadenomas are common benign breast tumors often too small to feel by hand, though occasionally, they may grow to be several inches in diameter. Fibroadenomas are made up of both glandular and stromal (connective) breast tissue and usually occur in women between 20-30 years of age. According to the American Cancer Society, African-American women are affected with fibroadenomas more often than women of other racial or ethnic groups. Phyllodes tumors are also benign breast tumors in the glandular and stroma breast tissues but are far less common than fibroadenomas. The difference between phyllodes tumors and fibroadenomas is that there is an overgrowth of the fibro-connective tissue in phyllodes tumors. Phyllodes tumors are usually benign but on very rare occasions, they may be malignant (cancerous) and could metastasize. Granular cell tumors are usually found in the mouth or skin but may rarely be detected in the breast as well. However, granular cell tumors do not indicate higher risk for developing breast cancer. Mastitis is an inflammation of breast tissue that commonly occurs during breast feeding.

### TNM Stage

[0010] The TNM classification was devised by the International Union Against Cancer (UICC) and accepted by the American Joint Commission on Cancer Staging. TNM is based on the clinical features of tumor (T), the regional lymph nodes (N), and the presence or absence of distant metastases (M). The tumor is characterized by its size, so that a T1 is a tumor under 2 cm, a T2 is 2 to 5 cm, and a T3 is over 5 cm. Breast carcinomas in-situ are labeled Tis and distinguished in ductal carcinoma in-situ (DCIS), lobular carcinoma in-situ (LCIS) and Paget's disease. Similarly, N0 represents negative or normal regional lymph nodes and MO absence of distant metastases, respectively. Involvement of the ipsilateral axillary lymph nodes is the most reliable and reproducible prognostic indicator for primary breast cancer. In general, 50 to 70% of patients with positive lymph nodes have a relapse, whereas only 20 to 35% of patients with all lymph nodes negative for metastatic disease have a relapse after loco-regional treatments only.

### Grade

[0011] Tumor grade reflects the differentiation status of the tumor. Breast cancer differentiation is usually described as well (grade 1), moderately (grade 2) or poorly (grade 3) differentiated, respectively. Poorly differentiated tumors tend to be more aggressive. Eighty-six percent of patients having tumors of good nuclear grade survived for 8 years as opposed to 64% in whom the nuclear grade was scored as poor.

### Hormone Receptor Status

[0012] Hormone receptor levels are important parameters to classify breast cancer both with respect to prognosis as well as for treatment planning. Patients with ER-positive tumor tend to have a more indolent course and to metastasize preferentially to soft tissue and bone; conversely, those with ER-negative tumors relapse earlier, and metastases to liver, lung, and central nervous system are more likely. ER-positive tumors are more often well differentiated and are associated with other favorable prognostic characteristics. Although patients with ER-positive tumors tend to have better short-term disease-free and overall survival rates than do patients with ER-negative tumors, the differences between the two groups tend to diminish or even disappear with time. PsR appeared in some studies to be a more valuable prognostic indicator than the ER. In addition, high levels of estrogen receptor expression are predictors of a favorable response to endocrine therapy.

### Age and Menopausal Status

[0013] A large study with long follow-up indicated that women 45 to 49 years of age had the best prognosis and that the very young (those under age 35 years) or elderly patients had the worst breast cancer survival. However, when other, more important tumor characteristics are considered, age and menopausal status are not important prognostic indicators.

### Diagnosis and Treatment.

### Diagnosis

[0014] Breast cancer is often diagnosed as a palpable mass by self examination of the patient or during a clinical breast examination by a physician. The increasing use of mammography in breast cancer screening has resulted in many cancers being found already in a stage where no palpable mass is detectable. Suspicious masses are usually followed up by further imaging such as ultra sound or MRI and definitive diagnosis is confirmed by needle biopsy.

### Screening

[0015] The American Cancer Society currently recommends the following guidelines for the detection of breast cancer in women who are asymptomatic:
[0016] Women 20 years of age and older should perform breast self-examination (BSE) every month.
[0017] Women 20-39 should have a physical examination of the breast (CBE or clinical breast exam) at least every three years, performed by health care professional such as a physician, physician assistant, nurse or nurse practitioner. CBE may often be received in the same appointment as a Pap smear.
[0018] Women 20-39 should also perform monthly BSE.
[0019] Women 40 and older should have a physical examination of the breast (CBE or clinical breast exam) every year, performed by a health care professional, such as a physician, physician assistant, nurse or nurse practitioner. CBE can often be performed in the same visit as a mammogram. Monthly BSE should also be performed.
[0020] Women 40 years of age and older should have a screening mammogram every year in addition to annual CBE and monthly BSE.

### 3. Breast Self Examination (BSE) and Clinical Breast Examination (CBE)

[0021] In 2001, new analyses were conducted for clinical breast exam and breast self-exam. There is no direct, but some indirect, evidence that CBE decreases breast cancer mortality. CBE has an overall sensitivity of 54%, which varies with the patient's age and size of the mass, as well as the provider's skill in clinical examination. In the absence of direct evidence, the recommendation for CBE was based on consensus opinion. Regarding breast self exam, a meta-analysis of 6 large controlled trials found no reduction in the relative risk of mortality in women performing BSE vs. those not performing BSE (0.94, 95% C.I. 0.83-1.06). Recently it was further questioned whether routine BSE reduces breast cancer mortality and might even harm. Despite this evidence breast self examination (BSE) and clinical breast examination (CBE) are both still part of the current guidelines for breast cancer screening.

### 4. Mammography

[0022] Mammography is currently the only exam approved by the U.S. Food and Drug Administration (FDA) to screen for breast cancer in asymptomatic women. Randomly controlled trials conducted in the US and several European countries have demonstrated that routine mammography screening can reduce breast cancer mortality by 2040% if performed annually. On average the sensitivity of mammography is up to 85%. However, mammography is less sensitive in patients with dense breast or benign breast conditions such as fibrocystic changes or lumps. Five to 10 percent of screening mammogram results are abnormal and require more testing. False positive rates are higher in younger women due to higher density of their breasts.

[0023] In the US, mammography screening has been established for the general population. Although mammography involves low dose radiation and discomfort to the tested person, the compliance rate is around 70%. The average charge for screening mammography is $141, $101 technical, $40 for interpretation. Despite the obvious success of mammography, growing difficulty has been reported to recruit trained staff, both doctors and nurses, for mammography clinics resulting in a 8% decline of sites over the last 4 years. It was speculated that this might be due to long hours, low reimbursement, heavy regulation and fear of lawsuits.

### 5. MRI Screening

[0024] MRI imaging is mainly used to follow up positive mammography results. MRI is very sensitive, is well suited to analyze dense breasts and younger women, but is slower, more expensive, and is more difficult to guide breast biopsies. Currently, trials are ongoing to assess MRI for screening in high risk populations such as carriers of breast cancer susceptibility gene mutations

### Breast Cancer Therapy.

[0025] Due to current screening programs and the accessibility to self-examination, breast cancer is diagnosed comparatively early: in about 65% of all newly diagnosed cases, the cancer is limited to the breast and has not yet spread to the lymph nodes. Therefore, for most patients diagnosed with organ confined breast cancer the suggested primary therapeutic intervention is surgery often followed by radiation therapy.

[0026] Although the tumor can be completely removed by surgery in most early stage breast cancer patients. However, without further therapy, about one third of these will develop metastases during follow-up. It is thought that this is due to occult metastases (or micrometastases) already present at the time of surgery. Based on this observation, systemic adjuvant treatment has been introduced also for node-negative breast cancers. Systemic adjuvant therapy is administered after surgical removal of the tumor, and has been shown to reduce the risk of recurrence significantly (Early Breast Cancer Trialists'Collaborative Group, 1998). Several types of adjuvant treatment are available: endocrine treatment (for hormone receptor positive tumors), different chemotherapy regimens, and novel agents like Herceptin. The treatment regimen for the individual patient is chosen according to guidelines such as St Gallen or NIH which are based on the pathological classification of the tumor (mainly TNM, grade, ER status).

[0027] Based on figures from the American Cancer Society, the prognosis of breast cancer is clearly correlated with cancer stage. The earlier a tumor is detected the better the prognosis for survival. Therefore, breast cancer screening tests that detect cancer at an early result in a reduction of breast cancer mortality.

### Methylation and Breast Cancer.

[0028] Epigenetic regulation such as DNA methylation has been established as a frequent and early event in carcinogenesis In particular for breast cancer, the contribution of DNA methylation has been well documented. Widschwendter and Jones (Oncogene. 2002 Aug. 12; 21(35):5462-82.) demonstrated in a recent review that DNA methylation changes have been reported in the context of all relevant steps in breast carcinogenesis including 1) evasion of apoptosis, 2) insensitivity to antigrowth signals, 3) self-sufficiency in growth signals, 4) limitless replicative potential, 5) tissue invasion and metastasis and 6) sustained angiogenesis. Less well documented is the role of DNA methylation in early pre cancerous lesions such as DCIS and in less frequent cancerous lesions such as lobular carcinoma. Fackler et al. showed that 95% of DCIS lesions (N=44) showed hypermethylation of at least one out or 5 genes including RASSF1A, HIN-1, RAR-beta, Cyclin D2 and Twist. The same authors compared frequency of hypermethylation of these genes between ductal and lobular carcinomas and found similar methylation patterns except for TWIST which was found less hypermethylated in lobular carcinomas. Similarly, Lehmann et al. reported very early stage changes in methylation of both RASSFIA and stratifin and found more frequent inactivation of DAPK in lobular carcinomas compared with ductal carcinomas. Early stage methylation changes in DCIS for RASSF1A and stratifin were confirmed by other groups.

[0029] In order to screen an asymptomatic population, candidate molecular markers have to be detectable in remote samples in order to allow for non invasive screening assays. It is well established that DNA from breast tumors can be detected as free nucleic acid in serum and plasma. Alternatively fluids obtained directly from the breast such as nipple aspirate fluid (NAF) or ductal lavage have also been suggested as a body fluid source for molecular testing. However, since the procedures to obtain NAF and ductal lavage have been questioned for their reliability and are uncomfortable for the patient, blood based testing is clearly preferred for screening assays.

[0030] Blood based molecular cancer screening assays are faced with the challenge to detect minute amounts of tumor DNA in a background of normal DNA from other tissues. Tumor markers that are based on DNA methylation can be detected using assays that amplify DNA in a methylation specific way such as MSP or HeavyMethyl™. These assays allow highly sensitive detection of few copies of methylated DNA in a background of excess normal DNA

[0031] Multifactorial approach. Cancer diagnostics has traditionally relied upon the detection of single molecular markers (e.g. gene mutations, elevated PSA levels). Unfortunately, cancer is a disease state in which single markers have typically failed to detect or differentiate many forms of the disease. Thus, assays that recognize only a single marker have been shown to be of limited predictive value, as well be discussed briefly herein. A successful approach currently being pursued in methylation based cancer diagnostics and the screening, diagnosis, and therapeutic monitoring of such diseases is the use of a selection of multiple markers. The multiplexed analytical approach is particularly well suited for cancer diagnostics since cancer is not a simple disease, this multi-factorial “panel” approach is consistent with the heterogeneous nature of cancer, both cytologically and clinically.

[0032] Key to the successful implementation of a panel approach to methylation based diagnostic tests is the design and development of optimized panels of markers that can characterize and distinguish disease states. This patent application describes an efficient and unique panel of genes the methylation analysis of one or a combination of the members of the panel enabling the detection of cell proliferative disorders of the prostate with a particularly high sensitivity, specificity and/or predictive value.

[0033] Development of medical tests. Two key evaluative measures of any medical screening or diagnostic test are its sensitivity and specificity, which measure how well the test performs to accurately detect all affected individuals without exception, and without falsely including individuals who do not have the target disease (predictive value). Historically, many diagnostic tests have been criticized due to poor sensitivity and specificity.

[0034] A true positive (TP) result is where the test is positive and the condition is present. A false positive (FP) result is where the test is positive but the condition is not present. A true negative (TN) result is where the test is negative and the condition is not present. A false negative (FN) result is where the test is negative but the condition is not present.

Sensitivity=TP/(TP+FN)

Specificity=TN/(FP+TN)

Predictive value=TP/(TP+FP)

[0035] Sensitivity is a measure of a test's ability to correctly detect the target disease in an individual being tested. A test having poor sensitivity produces a high rate of false negatives, i.e., individuals who have the disease but are falsely identified as being free of that particular disease. The potential danger of a false negative is that the diseased individual will remain undiagnosed and untreated for some period of time, during which the disease may progress to a later stage wherein treatments, if any, may be less effective. An example of a test that has low sensitivity is a protein-based blood test for HIV. This type of test exhibits poor sensitivity because it fails to detect the presence of the virus until the disease is well established and the virus has invaded the bloodstream in substantial numbers. In contrast, an example of a test that has high sensitivity is viral-load detection using the polymerase chain reaction (PCR). High sensitivity is achieved because this type of test can detect very small quantities of the virus. High sensitivity is particularly important when the consequences of missing a diagnosis are high.

[0036] Specificity, on the other hand, is a measure of a test's ability to identify accurately patients who are free of the disease state. A test having poor specificity produces a high rate of false positives, i.e., individuals who are falsely identified as having the disease. A drawback of false positives is that they force patients to undergo unnecessary medical procedures treatments with their attendant risks, emotional and financial stresses, and which could have adverse effects on the patient's health. A feature of diseases which makes it difficult to develop diagnostic tests with high specificity is that disease mechanisms, particularly in cancer, often involve a plurality of genes and proteins. Additionally, certain proteins may be elevated for reasons unrelated to a disease state. An example of a test that has high specificity is a gene-based test that can detect a p53 mutation. Specificity is important when the cost or risk associated with further diagnostic procedures or further medical intervention are very high.

[0037] Methylation analysis of breast fluids. The detectability of methylation in body fluids of breast cancer patients has been established. Silva et al. (Br J Cancer. 1999 June; 80(8):1262-4.) described the detection of methylated p16INK4a exon 1 in the plasma of five of eight tested breast cancer patients with p16INK4a exon 1 tumor methylation. The sensitivity of the analysis has since been improved by analyzing a panel of genes. Krassenstein et al. (Clin Cancer Res. 2004 Jan. 1; 10(1 Pt 1):28-32.) described the analysis of a panel of six genes (GSTP1, RARB2, p16INK4a, p14ARF, RASSF1A and DAPK) in matched tumor and nipple aspirate fluid (herein also referred to as NAF). Using a small sample set (22 tumors, 5 healthy patients and 5 benign breast patients) it was established that at least one gene of the panel was methylated in the tumor, and that this methylation could be detected in the NAF of 18 of the 22 breast cancer.

[0038] Although the study by Krassenstein et al. confirms that methylation observed in tumour tissue can be detected in breast derived fluid there are several technical problems associated with providing a body fluid based test, some of which were acknowledged but not satisfactorily resolved. Firstly, the markers used by Krassenstein were not specifically methylated in breast cancer, but were general cancer markers methylated in a range of cancers. Therefore, if said panel were to be utilized in a clinical setting it is probable that there would be an increased number of false positives, where methylated DNA from cancers of other tissues (or free-floating DNA therefrom) would be detected.

[0039] Although Krassenstein et al. aimed to provide a breast cancer screening test, patient compliance with a procedure such as NAF (or e.g. ductal lavage) would likely be low, except in the most at-risk populations. The preferred sample type for a screening test with high patient compliance would more preferably be blood based. The performance of a panel tested on tissue or NAF is no indicator as to its performance on a blood sample. Therefore, any panel would have to be validated on blood samples in order to establish that the markers were not also methylated in blood.

[0040] These issues were both shortly addressed by Evron et al. (Lancet. 2001 Apr. 28; 357(9265):1335-6.). In this study a gene panel consisting, of Cyclin D2, RARB and Twist was selected based on factors including their methylation status in white blood cells. The methylation status of these genes was then analyzed in matched tissue and ductal lavage fluid. The gene panel detected invasive breast cancer in 48 of 50 samples.

[0041] The main aim of a screening test is the detection of low grade tumors, such as DCIS, higher grade tumors are easily detected by e.g. self-examination and mammography and are harder to treat. This was not enabled by Krassenstein et al. The sample set used consisted of mostly high grade (2 and 3) tumors. There was only one grade 1 tumor. Therefore it may be concluded the suitability of the panel for the detection of low grade tumors has not been fully established, in particular as it is not possible to confirm if the NAF sample in question tested positive for methylation. Furthermore, it is generally assumed that methylation is a progressive feature of tumorigenesis. One would conclude that it is in the detection of the early stages of tumorigenesis that a highly specifically selected panel of genetic markers as opposed to a panel of markers selected for their methylation status in high grade tumor tissue would be required. The panel investigated by Evron et al. detected only 8 out of 14 cases of DCIS thus confirming that a panel suited to the detection of breast cancers is not necessarily suitable for detection of DCIS.

[0042] One can summarize the state of the art in that methylation gene panels for the analysis of breast fluids are known, however, there are deficiencies associated with all said panels. Due to these technical difficulties none of these gene panels fulfill the requirements of a breast cancer screening test, namely that the test is suitable for use in body fluids, most preferably blood and that the test be capable of detecting early stage cell proliferative disorders such as DCIS.

[0043] The use of a panel of methylation markers consisting RASSF1A, TWIST, Cyclin D2 and HIN1 for the differentiation of invasive breast carcinoma from normal breast tissue was recently described by Fackler et al. By use of a highly sensitive quantitative multiplexed methylation-specific PCR assay the study detected the presence of promoter hypermethylation of the gene panel in breast cancer (as opposed to normal breast tissue) with a sensitivity of 84% and a specificity of 94%. Therefore, the study is significant in establishing the use of methylation markers for the sensitive detection of breast cancer cells in a background of non-cancerous cells. However, the samples used by Fackler et al., were tissue based (including those extracted by means of ductal lavage), thus it has not been established whether such a sensitivity and specificity would be obtainable using body fluid based samples. Furthermore, the same panel proved unable of detecting ductal carcinoma in-situ. Therefore, the method is unsuitable for use as an early screening test.

### SUMMARY OF THE INVENTION

[0044] The present invention provides novel methods for detecting and/or distinguishing between breast cell proliferative disorders. In preferred embodiments the present invention enables the screening of at-risk populations for the early detection of breast cancers. Further embodiments of the method may also be used as alternatives to cytological screening for the differentiation of breast carcinomas from benign breast cell proliferative disorders.

[0045] The invention achieves solves this longstanding need in the art by providing a panel of genes and/or genomic sequences according to Table 3, the expression of these genes are indicative of the presence or absence of breast cell proliferative disorders or features thereof. Preferred selections and combinations of genes are provided, the analysis of which enable the differentiation and detection of various classes of breast cell proliferative disorders, namely:
[0046] Detection of breast cell proliferative disorders.
[0047] Detection of early stage breast cancers, including differentiation from benign breast cell proliferative disorders.
[0048] Differentiation of breast cancers from other cancers
[0049] Detection of breast cancer cells in a background of blood or fluids derived therefrom.
[0050] Differentiation of DCIS from benign breast cell proliferative disorders (including healthy breast tissue).

[0051] It is particularly preferred that the expression status of said genes and/or genomic sequences is determined according to the methylation status of CpG positions thereof.

[0052] In order to enable this analysis the invention provides a method for the analysis of biological samples for genomic methylation associated with the development of breast cell proliferative disorders. Said method is characterized in that at least one nucleic acid, or a fragment thereof, from the group consisting of SEQ ID NO: 1 to SEQ ID NO: 118 is/are contacted with a reagent or series of reagents capable of distinguishing between methylated and non methylated CpG dinucleotides within the genomic sequence, or sequences of interest.

[0053] The present invention provides further methods for ascertaining genetic and/or epigenetic parameters of SEQ ID NO: 1 to SEQ ID NO: 118, including but not limited to mRNA expression analysis, protein expression analysis and methylation analysis. The method has utility for the improved diagnosis, differentiation and treatment of breast cell proliferative disorders, more specifically by enabling the improved detection of and differentiation between subclasses of said disorder. The invention presents several improvements over the state of the art. Although methylation assays for the detection of breast cancer in body fluids are known there is currently no assay that fulfills the criteria of being validated in blood and capable of detecting DCIS with a suitable accuracy for commercial approval.

[0054] The source may be any suitable source, such as cell lines, histological slides, biopsies, paraffin-embedded tissue, body fluids, blood plasma, blood serum, whole blood, isolated blood cells, cells isolated from the blood and all possible combinations thereof. It is preferred that said sources of DNA are body fluids selected from the group consisting nipple aspirate fluid, lymphatic fluid, ductal lavage fluid, fine needle aspirate, blood plasma, blood serum, whole blood, isolated blood cells, cells isolated from the blood.

[0055] Specifically, the present invention provides a method for detecting breast cell proliferative disorders, comprising: obtaining a biological sample comprising genomic nucleic acid(s); contacting the nucleic acid(s), or a fragment thereof, with one reagent or a plurality of reagents sufficient for distinguishing between methylated and non methylated CpG dinucleotide sequences within a target sequence of the subject nucleic acid, wherein the target sequence comprises, or hybridizes under stringent conditions to, a sequence comprising at least 16 contiguous nucleotides of SEQ ID NO: 1 to SEQ ID NO: 118, said contiguous nucleotides comprising at least one CpG dinucleotide sequence; and determining, based at least in part on said distinguishing, the methylation state of at least one target CpG dinucleotide sequence, or an average, or a value reflecting an average methylation state of a plurality of target CpG dinucleotide sequences. Preferably, distinguishing between methylated and non methylated CpG dinucleotide sequences within the target sequence comprises methylation state-dependent conversion or non-conversion of at least one such CpG dinucleotide sequence to the corresponding converted or non-converted dinucleotide sequence within a sequence selected from the group consisting of SEQ ID NO: 493 to SEQ ID NO: 964, and contiguous regions thereof corresponding to the target sequence.

[0056] Additional embodiments provide a method for the detection of breast cell proliferative disorders comprising: obtaining a biological sample having subject genomic DNA; extracting the genomic DNA; treating the genomic DNA, or a fragment thereof, with one or more reagents to convert 5-position unmethylated cytosine bases to uracil or to another base that is detectably dissimilar to cytosine in terms of hybridization properties; contacting the treated genomic DNA, or the treated fragment thereof, with an amplification enzyme and at least two primers comprising, in each case a contiguous sequence at least 9 nucleotides in length that is complementary to, or hybridizes under moderately stringent or stringent conditions to a sequence selected from the group consisting SEQ ID NO: 493 to SEQ ID NO: 964, and complements thereof, wherein the treated DNA or the fragment thereof is either amplified to produce an amplificate, or is not amplified; and determining, based on a presence or absence of, or on a property of said amplificate, the methylation state of at least one CpG dinucleotide sequence selected from the group consisting of SEQ ID NO: 1 to SEQ ID NO: 118, or an average, or a value reflecting an average methylation state of a plurality of CpG dinucleotide sequences thereof. Preferably, at least one such hybridizing nucleic acid molecule or peptide nucleic acid molecule is bound to a solid phase. Preferably, determining comprises use of at least one method selected from the group consisting of: hybridizing at least one nucleic acid molecule comprising a contiguous sequence at least 9 nucleotides in length that is complementary to, or hybridizes under moderately stringent or stringent conditions to a sequence selected from the group consisting of SEQ ID NO: 493 to SEQ ID NO: 964, and complements thereof; hybridizing at least one nucleic acid molecule, bound to a solid phase, comprising a contiguous sequence at least 9 nucleotides in length that is complementary to, or hybridizes under moderately stringent or stringent conditions to a sequence selected from the group consisting of SEQ ID NO: 493 to SEQ ID NO: 964, and complements thereof; hybridizing at least one nucleic acid molecule comprising a contiguous sequence at least 9 nucleotides in length that is complementary to, or hybridizes under moderately stringent or stringent conditions to a sequence selected from the group consisting of SEQ ID NO: 493 to SEQ ID NO: 964, and complements thereof, and extending at least one such hybridized nucleic acid molecule by at least one nucleotide base; and sequencing of the amplificate.

[0057] Further embodiments provide a method for the analysis of breast cell proliferative disorders, comprising: obtaining a biological sample having subject genomic DNA; extracting the genomic DNA; contacting the genomic DNA, or a fragment thereof, comprising one or more sequences selected from the group consisting of SEQ ID NO: 1 to SEQ ID NO: 118 or a sequence that hybridizes under stringent conditions thereto, with one or more methylation-sensitive restriction enzymes, wherein the genomic DNA is either digested thereby to produce digestion fragments, or is not digested thereby; and determining, based on a presence or absence of, or on property of at least one such fragment, the methylation state of at least one CpG dinucleotide sequence of one or more sequences selected from the group consisting of SEQ ID NO: 1 to SEQ ID NO: 118, or an average, or a value reflecting an average methylation state of a plurality of CpG dinucleotide sequences thereof. Preferably, the digested or undigested genomic DNA is amplified prior to said determining.

[0058] Additional embodiments provide novel genomic and chemically modified nucleic acid sequences, as well as oligonucleotides and/or PNA-oligomers for analysis of cytosine methylation patterns within sequences from the group consisting of SEQ ID NO: 1 to SEQ ID NO: 118.

[0059] In a further embodiment the present invention provides DNA markers associated with the presence of general cancers.

### BRIEF DESCRIPTION OF THE DRAWINGS

[0060] FIG. 1 provides two plots. On the left hand side is a binary distribution curve showing the analysis of SEQ ID NO: 4048 (Assay 1) according to Example 2 by means of the quantitative assay shown in Table 22, results shown in Table 23. The Y-Axis shows the proportion of analysed samples with a methylation level greater than the quantified value shown on the X-axis. On the right hand side is a ROC plot of said assay calculated according to Example 2.

[0061] FIG. 2 provides two plots. On the left hand side is a binary distribution curve showing the analysis of SEQ ID NO: 22 (NR2E1) (Assay o) according to Example 2 by means of the quantitative assay shown in Table 22, results shown in Table 23. The Y-Axis shows the proportion of analysed samples with a methylation level greater than the quantified value shown on the X-axis. On the right hand side is a ROC plot of said assay calculated according to Example 2.

[0062] FIG. 3 provides two plots. On the left hand side is a binary distribution curve showing the analysis of SEQ ID NO: 29 (Assay 2) according to Example 2 by means of the quantitative assay shown in Table 22, results shown in Table 23. The Y-Axis shows the proportion of analysed samples with a methylation level greater than the quantified value shown on the X-axis. On the right hand side is a ROC plot of said assay calculated according to Example 2.

[0063] FIG. 4 provides two plots. On the left hand side is a binary distribution curve showing the analysis of SEQ ID NO: 90 (RASSF1A) (Assay 1) according to Example 2 by means of the quantitative assay shown in Table 22, results shown in Table 23. The Y-Axis shows the proportion of analysed samples with a methylation level greater than the quantified value shown on the X-axis. On the right hand side is a ROC plot of said assay calculated according to Example 2.

[0064] FIG. 5 provides two plots. On the left hand side is a binary distribution curve showing the analysis of SEQ ID NO: 77 (FABP3) (Assay 1-5) according to Example 2 by means of the quantitative assay shown in Table 22, results shown in Table 23. The Y-Axis shows the proportion of analysed samples with a methylation level greater than the quantified value shown on the X-axis. On the right hand side is a ROC plot of said assay calculated according to Example 2.

[0065] FIG. 6 provides two plots. On the left hand side is a binary distribution curve showing the analysis of SEQ ID NO: 104 (CCND2) (Assay 4) according to Example 2 by means of the quantitative assay shown in Table 22, results shown in Table 23. The Y-Axis shows the proportion of analysed samples with a methylation level greater than the quantified value shown on the X-axis. On the right hand side is a ROC plot of said assay calculated according to Example 2.

[0066] FIG. 7 provides two plots. On the left hand side is a binary distribution curve showing the analysis of SEQ ID NO: 38 (LMX1A) (Assay 3) according to Example 2 by means of the quantitative assay shown in Table 22, results shown in Table 23. The Y-Axis shows the proportion of analysed samples with a methylation level greater than the quantified value shown on the X-axis. On the right hand side is a ROC plot of said assay calculated according to Example 2.

[0067] FIG. 8 provides two plots. On the left hand side is a binary distribution curve showing the analysis of SEQ ID NO: 20 (PRDM6) (Assay o) according to Example 2 by means of the quantitative assay shown in Table 22, results shown in Table 23. The Y-Axis shows the proportion of analysed samples with a methylation level greater than the quantified value shown on the X-axis. On the right hand side is a ROC plot of said assay calculated according to Example 2.

[0068] FIG. 9 provides two plots. On the left hand side is a binary distribution curve showing the analysis of SEQ ID NO: 13 (MSF) (Assay 2) according to Example 2 by means of the quantitative assay shown in Table 22, results shown in Table 23. The Y-Axis shows the proportion of analysed samples with a methylation level greater than the quantified value shown on the X-axis. On the right hand side is a ROC plot of said assay calculated according to Example 2.

[0069] FIG. 10 provides two plots. On the left hand side is a binary distribution curve showing the analysis of SEQ ID NO: 112 (SLIT2) (Assay 2-2-5) according to Example 2 by means of the quantitative assay shown in Table 22, results shown in Table 23. The Y-Axis shows the proportion of analysed samples with a methylation level greater than the quantified value shown on the X-axis. On the right hand side is a ROC plot of said assay calculated according to Example 2.

[0070] FIG. 11 provides two plots. On the left hand side is a binary distribution curve showing the analysis of SEQ ID NO: 98 (DAPK1) (Assay 2) according to Example 2 by means of the quantitative assay shown in Table 22, results shown in Table 23. The Y-Axis shows the proportion of analysed samples with a methylation level greater than the quantified value shown on the X-axis. On the right hand side is a ROC plot of said assay calculated according to Example 2.

[0071] FIG. 12 provides two plots. On the left hand side is a binary distribution curve showing the analysis of SEQ ID NO: 115 (SCGB3A1) (Assay 1) according to Example 2 by means of the quantitative assay shown in Table 22, results shown in Table 23. The Y-Axis shows the proportion of analysed samples with a methylation level greater than the quantified value shown on the X-axis. On the right hand side is a ROC plot of said assay calculated according to Example 2.

[0072] FIG. 13 provides three plots. On the left hand side are two binary distribution curves showing the analysis of SEQ ID NO: 90 (RASSF1A) (Assay 1) according to Example 2 by means of the quantitative assay shown in Table 22, results shown in Table 24. The Y-Axis shows the proportion of analysed samples with a methylation level greater than the quantified value shown on the X-axis. On the right hand side is a ROC plot of said assay calculated according to Example 2.

[0073] FIG. 14 provides three plots. On the left hand side are two binary distribution curves showing the analysis of SEQ ID NO: 38 (LMX1A) (Assay 3) according to Example 2 by means of the quantitative assay shown in Table 22, results shown in Table 24. The Y-Axis shows the proportion of analysed samples with a methylation level greater than the quantified value shown on the X-axis. On the right hand side is a ROC plot of said assay calculated according to Example 2.

[0074] FIG. 15 provides two plots. On the left hand side is a binary distribution curve showing the analysis of SEQ ID NO: 13 (MSF) (Assay 2) according to Example 2 by means of the quantitative assay shown in Table 22, results shown in Table 24. The Y-Axis shows the proportion of analysed samples with a methylation level greater than the quantified value shown on the X-axis. On the right hand side is a ROC plot of said assay calculated according to Example 2.

[0075] FIG. 16 provides three plots. On the left hand side are two binary distribution curves showing the analysis of SEQ ID NO: 104 (CCND2) (Assay 4) according to Example 2 by means of the quantitative assay shown in Table 22, results shown in Table 24. The Y-Axis shows the proportion of analysed samples with a methylation level greater than the quantified value shown on the X-axis. On the right hand side is a ROC plot of said assay calculated according to Example 2.

[0076] FIG. 17 provides three plots. On the left hand side are two binary distribution curves showing the analysis of SEQ ID NO: 77 (FABP3) (Assay 1-5) according to Example 2 by means of the quantitative assay shown in Table 22, results shown in Table 24. The Y-Axis shows the proportion of analysed samples with a methylation level greater than the quantified value shown on the X-axis. On the right hand side is a ROC plot of said assay calculated according to Example 2.

[0077] FIG. 18 provides three plots. On the left hand side are two binary distribution curves showing the analysis of SEQ ID NO: 20 (PRDM6) (Assay o) according to Example 2 by means of the quantitative assay shown in Table 22, results shown in Table 24. The Y-Axis shows the proportion of analysed samples with a methylation level greater than the quantified value shown on the X-axis. On the right hand side is a ROC plot of said assay calculated according to Example 2.

[0078] FIGS. 19-78 provide a graphical representation of the results of the microarray analysis according to Example 1. Each of said figures presents a matrix of the level of methylation of each significant oligomer, oligomers belonging to each gene or genomic sequence are grouped in one discrete block. The SEQ ID NO: of each oligomer is shown on the left hand side of the matrix, on the right hand side of the matrix the FDR corrected multivariate P-value of the oligomers belonging to each individual gene or genomic sequence is shown. The level of methylation is shown by the color of each square of the matrix, from black representing total methylation (+2) to white representing total unmethylation (−2) as shown on the scale to the right hand side of the matrix. Each vertical line of the matrix represents one sample, the type of sample is shown above the matrix.

### DETAILED DESCRIPTION OF THE INVENTION

### Definitions

[0079] The term “Observed/Expected Ratio” (“O/E Ratio”) refers to the frequency of CpG dinucleotides within a particular DNA sequence, and corresponds to the [number of CpG sites/(number of C bases×number of G bases)]×band length for each fragment.

[0080] The term “CpG island” refers to a contiguous region of genomic DNA that satisfies the criteria of (1) having a frequency of CpG dinucleotides corresponding to an “Observed/Expected Ratio”>0.6, and (2) having a “GC Content”>0.5. CpG islands are typically, but not always, between about 0.2 to about 1 kb, or to about 2 kb in length.

[0081] The term “methylation state” or “methylation status” refers to the presence or absence of 5-methylcytosine (“5-mCyt”) at one or a plurality of CpG dinucleotides within a DNA sequence. Methylation states at one or more particular CpG methylation sites (each having two CpG CpG dinucleotide sequences) within a DNA sequence include “unmethylated,” “fully-methylated” and “hemi-methylated.”

[0082] The term “hemi-methylation” or “hemimethylation” refers to the methylation state of a double stranded nucleic acid, wherein only the CpG positions of one strand thereof is methylated (e.g., 5′-CC^{M}GG-3′ (top strand): 3′-GGCC-5′ (bottom strand)).

[0083] The term ‘AUC’ as used herein is an abbreviation for the area under a curve. In particular it refers to the area under a Receiver Operating Characteristic (ROC) curve. The ROC curve is a plot of the true positive rate against the false positive rate for the different possible cutpoints of a diagnostic test. It shows the trade-off between sensitivity and specificity depending on the selected cutpoint (any increase in sensitivity will be accompanied by a decrease in specificity). The area under an ROC curve (AUC) is a measure for the accuracy of a diagnostic test (the larger the area the better, optimum is 1, a random test would have a ROC curve lying on the diagonal with an area of 0.5; for reference: J. P. Egan. Signal Detection Theory and ROC Analysis, Academic Press, New York, 1975).

[0084] The term “hypermethylation” refers to the average methylation state corresponding to an increased presence of 5-mCyt at one or a plurality of CpG dinucleotides within a DNA sequence of a test DNA sample, relative to the amount of 5-mCyt found at corresponding CpG dinucleotides within a normal control DNA sample.

[0085] The term “hypomethylation” refers to the average methylation state corresponding to a decreased presence of 5-mCyt at one or a plurality of CpG dinucleotides within a DNA sequence of a test DNA sample, relative to the amount of 5-mCyt found at corresponding CpG dinucleotides within a normal control DNA sample.

[0086] The term “microarray” refers broadly to both “DNA microarrays,” and ‘DNA chip(s),’ as recognized in the art, encompasses all art-recognized solid supports, and encompasses all methods for affixing nucleic acid molecules thereto or synthesis of nucleic acids thereon.

[0087] “Genetic parameters” are mutations and polymorphisms of genes and sequences further required for their regulation. To be designated as mutations are, in particular, insertions, deletions, point mutations, inversions and polymorphisms and, particularly preferred, SNPs (single nucleotide polymorphisms).

[0088] “Epigenetic parameters” are, in particular, cytosine methylations. Further epigenetic parameters include, for example, the acetylation of histones which, however, cannot be directly analyzed using the described method but which, in turn, correlate with the DNA methylation.

[0089] The term “bisulfite reagent” refers to a reagent comprising bisulfite, disulfite, hydrogen sulfite or combinations thereof, useful as disclosed herein to distinguish between methylated and unmethylated CpG dinucleotide sequences.

[0090] The term “Methylation assay” refers to any assay for determining the methylation state of one or more CpG dinucleotide sequences within a sequence of DNA.

[0091] The term “MS.AP-PCR” (Methylation-Sensitive Arbitrarily-Primed Polymerase Chain Reaction) refers to the art-recognized technology that allows for a global scan of the genome using CG-rich primers to focus on the regions most likely to contain CpG dinucleotides, and described by Gonzalgo et al., Cancer Research 57:594-599, 1997.

[0092] The term “MethyLight™” refers to the art-recognized fluorescence-based real-time PCR technique described by Eads et al., Cancer Res. 59:2302-2306, 1999.

[0093] The term “HeavyMethyl™” assay, in the embodiment thereof implemented herein, refers to an assay, wherein methylation specific blocking probes (also referred to herein as blockers) covering CpG positions between, or covered by the amplification primers enable methylation-specific selective amplification of a nucleic acid sample. The HeavyMethyl assay has previously been described in WO02/072880 and Cottrell et al. Nucleic Acids Res. 2004 Jan. 13; 32(1):e10.

[0094] The term “HeavyMethyl™ MethyLigh™ assay, in the embodiment thereof implemented herein, refers to a HeavyMethyl™ MethyLight™ assay, which is a variation of the MethyLight™ assay, wherein the MethyLight™ assay is combined with methylation specific blocking probes covering CpG positions between the amplification primers.

[0095] The term “Ms-SNuPE” (Methylation-sensitive Single Nucleotide Primer Extension) refers to the art-recognized assay described by Gonzalgo and Jones, Nucleic Acids Res. 25:2529-2531, 1997.

[0096] The term “MSP” (Methylation-specific PCR) refers to the art-recognized methylation assay described by Herman et al. Proc. Natl. Acad. Sci. USA 93:9821-9826, 1996, and by U.S. Pat. No. 5,786,146.

[0097] The term “COBRA” (Combined Bisulfite Restriction Analysis) refers to the art-recognized methylation assay described by Xiong and Laird, Nucleic Acids Res. 25:2532-2534, 1997.

[0098] The term “MCA” (Methylated CpG Island Amplification) refers to the methylation assay described by Toyota et al., Cancer Res. 59:2307-12, 1999, and in WO 00/26401 A1.

[0099] The term “hybridization” is to be understood as a bond of an oligonucleotide to a complementary sequence along the lines of the Watson-Crick base pairings in the sample DNA, forming a duplex structure.

[0100] “Stringent hybridization conditions,” as defined herein, involve hybridizing at 68° C. in 5×SSC/5×Denhardt's solution/1.0% SDS, and washing in 0.2×SSC/0.1% SDS at room temperature, or involve the art-recognized equivalent thereof (e.g., conditions in which a hybridization is carried out at 60° C. in 2.5×SSC buffer, followed by several washing steps at 37° C. in a low buffer concentration, and remains stable). Moderately stringent conditions, as defined herein, involve including washing in 3×SSC at 42° C., or the art-recognized equivalent thereof. The parameters of salt concentration and temperature can be varied to achieve the optimal level of identity between the probe and the target nucleic acid. Guidance regarding such conditions is available in the art, for example, by Sambrook et al., 1989, Molecular Cloning, A Laboratory Manual, Cold Spring Harbor Press, N.Y.; and Ausubel et al. (eds.), 1995, Current Protocols in Molecular Biology, (John Wiley and Sons, N.Y.) at Unit 2.10.

[0101] The terms “array SEQ ID NO,” “composite array SEQ ID NO,” or “composite array sequence” refer to a sequence, hypothetical or otherwise, consisting of a head-to-tail (5′ to 3′) linear composite of all individual contiguous sequences of a subject array (e.g., a head-to-tail composite of SEQ ID NO: 1-118, in that order).

[0102] The terms “array SEQ ID NO node,” “composite array SEQ ID NO node,” or “composite array sequence node” refer to a junction between any two individual contiguous sequences of the “array SEQ ID NO,” the “composite array SEQ ID NO,” or the “composite array sequence.”

[0103] In reference to composite array sequences, the phrase “contiguous nucleotides” refers to a contiguous sequence region of any individual contiguous sequence of the composite array, but does not include a region of the composite array sequence that includes a “node,” as defined herein above.

### Overview:

[0104] The present invention provides for molecular genetic markers that have novel utility for the analysis of gene expression, most preferably as expressed in the methylation thereof, associated with the development of breast cell proliferative disorders. Said markers may be used for detecting and/or distinguishing between breast cell proliferative disorders, thereby providing improved means for the detection, classification and treatment of said disorders.

[0105] Bisulfite modification of DNA is an art-recognized tool used to assess CpG methylation status. 5-methylcytosine is the most frequent covalent base modification in the DNA of eukaryotic cells. It plays a role, for example, in the regulation of the transcription, in genetic imprinting, and in tumorigenesis. Therefore, the identification of 5-methylcytosine as a component of genetic information is of considerable interest. However, 5-methylcytosine positions cannot be identified by sequencing, because 5-methylcytosine has the same base pairing behavior as cytosine. Moreover, the epigenetic information carried by 5-methylcytosine is completely lost during, e.g., PCR amplification.

[0106] The most frequently used method for analyzing DNA for the presence of 5-methylcytosine is based upon the specific reaction of bisulfite with cytosine whereby, upon subsequent alkaline hydrolysis, cytosine is converted to uracil which corresponds to thymine in its base pairing behavior. Significantly, however, 5-methylcytosine remains unmodified under these conditions. Consequently, the original DNA is converted in such a manner that methylcytosine, which originally could not be distinguished from cytosine by its hybridization behavior, can now be detected as the only remaining cytosine using standard, art-recognized molecular biological techniques, for example, by amplification and hybridization, or by sequencing. All of these techniques are based on differential base pairing properties, which can now be fully exploited.

[0107] The present invention provides for the use of the bisulfite technique, in combination with one or more methylation assays, for determination of the methylation status of CpG dinucleotide sequences within sequences from the group consisting of SEQ ID NO: 1 to SEQ ID NO: 118. According to the present invention, determination of the methylation status of CpG dinucleotide sequences within sequences from the group consisting of SEQ ID NO: 1 to SEQ ID NO: 118 has diagnostic and prognostic utility.

[0108] Methylation Assay Procedures. Various methylation assay procedures are known in the art, and can be used in conjunction with the present invention. These assays allow for determination of the methylation state of one or a plurality of CpG dinucleotides (e.g., CpG islands) within a DNA sequence. Such assays involve, among other techniques, DNA sequencing of bisulfite-treated DNA, PCR (for sequence-specific amplification), Southern blot analysis, and use of methylation-sensitive restriction enzymes.

[0109] For example, genomic sequencing has been simplified for analysis of DNA methylation patterns and 5-methylcytosine distribution by using bisulfite treatment (Frommer et al., Proc. Natl. Acad. Sci. USA 89:1827-1831, 1992). Additionally, restriction enzyme digestion of PCR products amplified from bisulfite-converted DNA is used, e.g., the method described by Sadri and Hornsby (Nucl. Acids Res. 24:5058-5059, 1996), or COBRA (Combined Bisulfite Restriction Analysis) (Xiong and Laird, Nucleic Acids Res. 25:2532-2534, 1997).

[0110] COBRA. COBRA analysis is a quantitative methylation assay useful for determining DNA methylation levels at specific gene loci in small amounts of genomic DNA (Xiong and Laird, Nucleic Acids Res. 25:2532-2534, 1997). Briefly, restriction enzyme digestion is used to reveal methylation-dependent sequence differences in PCR products of sodium bisulfite-treated DNA. Methylation-dependent sequence differences are first introduced into the genomic DNA by standard bisulfite treatment according to the procedure described by Frommer et al. (Proc. Natl. Acad. Sci. USA 89:1827-1831, 1992). PCR amplification of the bisulfite converted DNA is then performed using primers specific for the CpG islands of interest, followed by restriction endonuclease digestion, gel electrophoresis, and detection using specific, labeled hybridization probes. Methylation levels in the original DNA sample are represented by the relative amounts of digested and undigested PCR product in a linearly quantitative fashion across a wide spectrum of DNA methylation levels. In addition, this technique can be reliably applied to DNA obtained from microdissected paraffin-embedded tissue samples. Typical reagents (e.g., as might be found in a typical COBRA-based kit) for COBRA analysis may include, but are not limited to: PCR primers for specific gene (or bisulfite treated DNA sequence or CpG island); restriction enzyme and appropriate buffer; gene-hybridization oligo; control hybridization oligo; kinase labeling kit for oligo probe; and labeled nucleotides. Additionally, bisulfite conversion reagents may include: DNA denaturation buffer; sulfonation buffer; DNA recovery reagents or kits (e.g., precipitation, ultrafiltration, affinity column); desulfonation buffer; and DNA recovery components.

[0111] Preferably, assays such as “MethyLight™” (a fluorescence-based real-time PCR technique) (Eads et al., Cancer Res. 59:2302-2306, 1999), Ms-SNuPE (Methylation-sensitive Single Nucleotide Primer Extension) reactions (Gonzalgo and Jones, Nucleic Acids Res. 25:2529-2531, 1997) and methylation-specific PCR (“MSP”; Herman et al., Proc. Natl. Acad. Sci. USA 93:9821-9826, 1996; U.S. Pat. No. 5,786,146) are used alone or in combination with other of these methods.

[0112] MethyLight™. The MethyLight™ assay is a high-throughput quantitative methylation assay that utilizes fluorescence-based real-time PCR (TaqMan™) technology that requires no further manipulations after the PCR step (Eads et al., Cancer Res. 59:2302-2306, 1999). Briefly, the MethyLight™ process begins with a mixed sample of genomic DNA that is converted, in a sodium bisulfite reaction, to a mixed pool of methylation-dependent sequence differences according to standard procedures (the bisulfite process converts unmethylated cytosine residues to uracil). Fluorescence-based PCR is then performed either in an “unbiased” (with primers that do not overlap known CpG methylation sites) PCR reaction, or in a “biased” (with PCR primers that overlap known CpG dinucleotides) reaction. Sequence discrimination can occur either at the level of the amplification process or at the level of the fluorescence detection process, or both.

[0113] The MethyLight™ assay may be used as a quantitative test for methylation patterns in the genomic DNA sample, wherein sequence discrimination occurs at the level of probe hybridization. In this quantitative version, the PCR reaction provides for unbiased amplification in the presence of a fluorescent probe that overlaps a particular putative methylation site. An unbiased control for the amount of input DNA is provided by a reaction in which neither the primers, nor the probe overlie any CpG dinucleotides. Alternatively, a qualitative test for genomic methylation is achieved by probing of the biased PCR pool with either control oligonucleotides that do not “cover” known methylation sites (a fluorescence-based version of the “MSP” technique), or with oligonucleotides covering potential methylation sites.

[0114] The MethyLight™ process can by used with a “TaqMan®” probe in the amplification process. For example, double-stranded genomic DNA is treated with sodium bisulfite and subjected to one of two sets of PCR reactions using TaqMan® probes; e.g., with either biased primers and TaqMan® probe, or unbiased primers and TaqMan® probe. The TaqMan® probe is dual-labeled with fluorescent “reporter” and “quencher” molecules, and is designed to be specific for a relatively high GC content region so that it melts out at about 10° C. higher temperature in the PCR cycle than the forward or reverse primers. This allows the TaqMan® probe to remain fully hybridized during the PCR annealing/extension step. As the Taq polymerase enzymatically synthesizes a new strand during PCR, it will eventually reach the annealed TaqMan® probe. The Taq polymerase 5′ to 3′ endonuclease activity will then displace the TaqMan® probe by digesting it to release the fluorescent reporter molecule for quantitative detection of its now unquenched signal using a real-time fluorescent detection system.

[0115] Typical reagents (e.g., as might be found in a typical MethyLight™-based kit) for MethyLight™ analysis may include, but are not limited to: PCR primers for specific gene (or bisulfite treated DNA sequence or CpG island); TaqMan® probes; optimized PCR buffers and deoxynucleotides; and Taq polymerase.

[0116] Ms-SNuPE. The Ms-SNuPE technique is a quantitative method for assessing methylation differences at specific CpG sites based on bisulfite treatment of DNA, followed by single-nucleotide primer extension (Gonzalgo and Jones, Nucleic Acids Res. 25:2529-2531, 1997). Briefly, genomic DNA is reacted with sodium bisulfite to convert umethylated cytosine to uracil while leaving 5-methylcytosine unchanged. Amplification of the desired target sequence is then performed using PCR primers specific for bisulfite-converted DNA, and the resulting product is isolated and used as a template for methylation analysis at the CpG site(s) of interest. Small amounts of DNA can be analyzed (e.g., microdissected pathology sections), and it avoids utilization of restriction enzymes for determining the methylation status at CpG sites.

[0117] Typical reagents (e.g., as might be found in a typical Ms-SNuPE-based kit) for Ms-SNuPE analysis may include, but are not limited to: PCR primers for specific gene (or bisulfite treated DNA sequence or CpG island); optimized PCR buffers and deoxynucleotides; gel extraction kit; positive control primers; Ms-SNuPE primers for specific gene; reaction buffer (for the Ms-SNuPE reaction); and labeled nucleotides. Additionally, bisulfite conversion reagents may include: DNA denaturation buffer; sulfonation buffer; DNA recovery regents or kit (e.g., precipitation, ultrafiltration, affinity column); desulfonation buffer; and DNA recovery components.

[0118] MSP. MSP (methylation-specific PCR) allows for assessing the methylation status of virtually any group of CpG sites within a CpG island, independent of the use of methylation-sensitive restriction enzymes (Herman et al. Proc. Natl. Acad. Sci. USA 93:9821-9826, 1996; U.S. Pat. No. 5,786,146). Briefly, DNA is modified by sodium bisulfite converting all unmethylated, but not methylated cytosines to uracil, and subsequently amplified with primers specific for methylated versus umethylated DNA. MSP requires only small quantities of DNA, is sensitive to 0.1% methylated alleles of a given CpG island locus, and can be performed on DNA extracted from paraffin-embedded samples. Typical reagents (e.g., as might be found in a typical MSP-based kit) for MSP analysis may include, but are not limited to: methylated and unmethylated PCR primers for specific gene (or bisulfite treated DNA sequence or CpG island), optimized PCR buffers and deoxynucleotides, and specific probes.

[0119] Genomic Sequences according to SEQ ID NO: 1 to SEQ ID NO: 118, and non-naturally occurring treated variants thereof according to SEQ ID NO: 493 to SEQ ID NO: 964, were determined to have utility for the detection, classification and/or treatment of breast cell proliferative disorders.

[0120] In one embodiment the invention provides a method for detecting and/or for detecting and distinguishing between or among breast cell proliferative disorders in a subject. Said method comprises the following steps

i) contacting genomic DNA obtained from the subject with at least one reagent, or series of reagents that distinguishes between methylated and non-methylated CpG dinucleotides within at least one target region of the genomic DNA, wherein said contiguous nucleotides comprise at least one CpG dinucleotide sequence, and
ii) detecting, or detecting and distinguishing between or among breast cell proliferative disorders.

[0121] It is particularly preferred that said genomic DNA is isolated from body fluids of the subject. It is further preferred that said body fluid is selected from the group consisting nipple aspirate fluid, lymphatic fluid, ductal lavage fluid, fine needle aspirate, blood plasma, blood serum, whole blood, isolated blood cells, cells isolated from the blood.

[0122] Genomic DNA may be isolated by any means standard in the art, including the use of commercially available kits. Briefly, wherein the DNA of interest is encapsulated in by a cellular membrane the biological sample must be disrupted and lysed by enzymatic, chemical or mechanical means. The DNA solution may then be cleared of proteins and other contaminants e.g. by digestion with proteinase K. The genomic DNA is then recovered from the solution. This may be carried out by means of a variety of methods including salting out, organic extraction or binding of the DNA to a solid phase support. The choice of method will be affected by several factors including time, expense and required quantity of DNA.

[0123] The genomic DNA sample is then treated in such a manner that cytosine bases which are unmethylated at the 5′-position are converted to uracil, thymine, or another base which is dissimilar to cytosine in terms of hybridization behavior. This will be understood as ‘treatment’ herein.

[0124] This is preferably achieved by means of treatment with a bisulfite reagent. The term “bisulfite reagent” refers to a reagent comprising bisulfite, disulfite, hydrogen sulfite or combinations thereof, useful as disclosed herein to distinguish between methylated and unmethylated CpG dinucleotide sequences. Methods of said treatment are known in the art (e.g. PCT/EP2004/011715, which is incorporated by reference in its entirety). It is preferred that the bisulfite treatment is conducted in the presence of denaturing solvents such as but not limited to n-alkylenglycol, particulary diethylene glycol dimethyl ether (DME), or in the presence of dioxane or dioxane derivatives. In a preferred embodiment the denaturing solvents are used in concentrations between 1% and 35% (v/v). It is also preferred that the bisulfite reaction is carried out in the presence of scavengers such as but not limited to chromane derivatives, e.g., 6-hydroxy-2,5,7,8-tetramethylchromane 2-carboxylic acid (see: PCT/EP2004/011715 which is incorporated by reference in its entirety). The bisulfite conversion is preferably carried out at a reaction temperature between 30° C. and 70° C., whereby the temperature is increased to over 85° C. for short periods of times during the reaction (see: PCT/EP2004/011715 which is incorporated by reference in its entirety). The bisulfite treated DNA is preferably purified prior to further analysis. This may be conducted by any means known in the art, such as but not limited to ultrafiltration, preferably carried out by means of Microcon™ columns (manufactured by Millipore™). The purification is carried out according to a modified manufacturer's protocol (see: PCT/EP2004/011715 which is incorporated by reference in its entirety).

[0125] The treated DNA is then analyzed in order to determine the methylation state of one or more target gene sequences (prior to the treatment) associated with the development of breast carcinoma. It is particularly preferred that the target region comprises, or hybridizes under stringent conditions to at least 16 contiguous nucleotides of at least one gene or genomic sequence selected from the group consisting the genes and genomic sequences as listed in Table 3. It is further preferred that the sequences of said genes in Table 3 as described in the accompanying sequence listing are analyzed. The method of analysis may be selected from those known in the art, including those listed herein. Particularly preferred are MethyLight™, MSP and the use of blocking oligonucleotides as will be described herein. It is further preferred that any oligonucleotides used in such analysis (including primers, blocking oligonucleotides and detection probes) should be reverse complementary, identical, or hybridize under stringent or highly stringent conditions to an at least 16-base-pair long segment of the base sequences of one or more of SEQ ID NO: 493 to SEQ ID NO: 964 and sequences complementary thereto.

[0126] Aberrant methylation, more preferably hypermethylation of one or more genes or genomic sequences taken from those listed in Table 3 are associated with the presence of breast carcinoma. Analysis of one or a plurality of the sequences enables detecting, or detecting and distinguishing between or among breast cell proliferative disorders.

[0127] In one embodiment, the method discloses the use of one or more genes or genomic sequences selected from the group consisting of APC, ARH1/NOEY2, BRCA2, CCND2, CDKN1A, CDKN2A, SEQ ID NO: 9, DAPK1, SEQ ID NO: 2, EYA4, FHIT, GSTP1, HIC1, IGFBP7, MLH1, PGR, SERPINB5, RARB, SFN, SOD2, TGFBR2, THRB, TIMP3, TP73, NME1, CDH13, THBS1, TMS1/ASC, ESR1, IL6, APAF1, CASP8, SYK, HOXA5, FABP3, RASSF1A, SEQ ID NO: 3, RARA, TWIST, ESR2, PLAU, STAT1, SEQ ID NO: 4, BRCA1, LOT1, PRSS8, SNCG, TPM1, GPC3, CLDN7, SLC19A1, GJB2, SLIT2, IGSF4, MCT1, HS3ST2, PRDM2, ALX4, SEQ ID NO: 5, SEQ ID NO: 6, SEQ ID NO: 7, SEQ ID NO: 8, SCGB3A1, SEQ ID NO: 1, PROSTAGLANDIN E2 RECEPTOR, EP4 SUBTYPE (PROSTANOID EP4 RECEPTOR) (PGE RECEPTOR, EP4 SUBTYPE), ORPHAN NUCLEAR RECEPTOR NR5A2 (ALPHA-1-FETOPROTEIN TRANSCRIPTION FACTOR) (HEPATOCYTIC TRANSCRIPTION FACTOR) (B1-BINDING FACTOR) (HB1F) (CYP7A PROMOTER BINDING FACTOR), LIM DOMAIN KINASE 1, SASH1, S100A7, BCL11B, SEQ ID NO: 51, MGC34831, SEQ ID NO: 54, PDLIM1, MSF, SEQ ID NO: 14, SEQ ID NO: 15, SEQ ID NO: 16, SEQ ID NO: 17, SEQ ID NO: 18, SEQ ID NO: 19, PRDM6, RAP2B, NR2E1, PCDH7, DKK3, RTTN, SNAP25, SEQ ID NO: 26, GIRK2, SEQ ID NO: 28, SEQ ID NO: 29, ARL7, SEQ ID NO: 31, THH, HOXB13, SEQ ID NO: 35, MGC10561, LMX1A, SENP3, GS1, TITF1, SEQ ID NO: 42, DDX51, SEQ ID NO: 117, SEQ ID NO: 45, SEQ ID NO: 46, O60279, and SEQ ID NO: 48 as markers for the detection of breast cancers.

[0128] The use of said genes and/or sequences may be enabled by means of any analysis of the expression of the gene, by means of mRNA expression analysis or protein expression analysis. However, in the most preferred embodiment of the invention, the detection of breast cell proliferative disorders is enabled by means of analysis of the methylation status of said genes or genomic sequences and their promoter or regulatory elements. Methods for the methylation analysis of genes are described herein.

[0129] It is also preferred that the expression level of only one gene or genomic sequence from the group consisting of PRDM2, PLAU, GSTP1, SLIT2, CCND2, HOXA5, RASSF1A, HS3ST2, ARH1/NOEY2, SCGB3A1, LIMK-1, SEQ ID NO: 6, SEQ ID NO: 3, SEQ ID NO: 18, SEQ ID NO: 7, SEQ ID NO: 41, SEQ ID NO: 22, SEQ ID NO: 46, SEQ ID NO: 13, and SEQ ID NO: 31 is analyzed. It is particularly preferred that this is carried out by means of methylation analysis.

[0130] In one embodiment the method discloses the use of one or more genes or genomic sequences selected from the group consisting of ARH1/NOEY2, CCND2, CDKN1A, CDKN2A, DAPK1, SEQ ID NO: 2, EYA4, FHIT, GSTP1, HIC1, IGFBP7, SERPINB5, TERT, TGFBR2, THRB, TIMP3, TP73, NME1, CDH13, THBS1, TMS1/ASC, IL6, APAF1, SYK, HOXA5, FABP3, RASSF1A, SEQ ID NO: 3, TWIST, ESR2, PLAU, STAT1, SEQ ID NO: 4, LOT1, GPC3, CLDN7, GJB2, SLIT2, IGSF4, MCT1, PRDM2, ALX4, SEQ ID NO: 5, SEQ ID NO: 6, SEQ ID NO: 8, SCGB3A1, SEQ ID NO: 1, PROSTAGLANDIN E2 RECEPTOR, EP4 SUBTYPE (PROSTANOID EP4 RECEPTOR) (PGE RECEPTOR, EP4 SUBTYPE), LIM DOMAIN KINASE 1, MGC34831, SEQ ID NO: 54, MSF, SEQ ID NO: 16, SEQ ID NO: 17, SEQ ID NO: 18, SEQ ID NO: 19, PRDM6, NR2E1, PCDH7, RTTN, SNAP25, SEQ ID NO: 26, SEQ ID NO: 28, ARL7, SEQ ID NO: 31, THH, HOXB13, SEQ ID NO: 35, MGC10561, LMX1A, SENP3, TITF1, SEQ ID NO: 42, DDX51, SEQ ID NO: 45, O60279, SEQ ID NO: 48 as markers for the differentiation of breast cancers from other cancers. Said use of the genes and/or sequences may be enabled by means of any analysis of the expression of the gene, by means of mRNA expression analysis or protein expression analysis. However, in the most preferred embodiment of the invention, the detection of breast cell proliferative disorders is enabled by means of analysis of the methylation status of said genes or genomic sequences and their promoter or regulatory elements. Methods for the methylation analysis of genes are described herein.

[0131] In said embodiment it is further preferred that the expression level of only one gene or genomic sequence from the group consisting PRDM2, GSTP1, ALX4, HOXA5, PLAU, RASSF1A, IGSF4, SLIT2, DAPK1, CDKN1A, SEQ ID NO: 38, SEQ ID NO: 35, LIMK-1, SEQ ID NO: 39, SEQ ID NO: 10, SEQ ID NO: 26, SEQ ID NO: 8, SEQ ID NO: 22, SEQ ID NO: 18, and SEQ ID NO: 47 is analyzed. It is particularly preferred that this is carried out by means of methylation analysis.

[0132] In one embodiment the method discloses the use of one or more genes or genomic sequences selected from the group consisting of APC, ARH1/NOEY2, CCND2, CDH1, CDKN1A, CDKN2A, SEQ ID NO: 9, DAPK1, SEQ ID NO: 2, EYA4, FHIT, GSTP1, HIC1, IGFBP7, PGR, SERPINB5, RARB, SFN, SOD2, TERT, TGFBR2, THRB, TIMP3, NME1, CDH13, THBS1, TMS1/ASC, ESR1, IL6, APAF1, CASP8, SYK, HOXA5, FABP3, RASSFIA, SEQ ID NO: 3, TWIST, ESR2, PLAU, STAT1, SEQ ID NO: 4, BRCA1, LOT1, PRSS8, SNCG, GPC3, CLDN7, SLC19A1, GJB2, SLIT2, IGSF4, MCT1, HS3ST2, PRDM2, ALX4, SEQ ID NO: 5, SEQ ID NO: 6, SEQ ID NO: 7, SEQ ID NO: 8, SCGB3A1, SEQ ID NO: 1, PROSTAGLANDIN E2 RECEPTOR, EP4 SUBTYPE (PROSTANOID EP4 RECEPTOR) (PGE RECEPTOR, EP4 SUBTYPE), ORPHAN NUCLEAR RECEPTOR NR5A2 (ALPHA-1-FETOPROTEIN TRANSCRIPTION FACTOR) (HEPATOCYTIC TRANSCRIPTION FACTOR) (B1-BINDING FACTOR) (HB1F) (CYP7A PROMOTER BINDING FACTOR), LIM DOMAIN KINASE 1, SASH1, S100A7, BCL11B, SEQ ID NO: 51, MGC34831, SEQ ID NO: 54, PDLIM1, MSF, SEQ ID NO: 14, SEQ ID NO: 15, SEQ ID NO: 16, SEQ ID NO: 17, SEQ ID NO: 18, SEQ ID NO: 19, PRDM6, RAP2B, NR2E1, PCDH7, DKK3, RTTN, SNAP25, SEQ ID NO: 26, GIRK2, SEQ ID NO: 28, SEQ ID NO: 29, ARL7, SEQ ID NO: 31, THH, HOXB13, SEQ ID NO: 35, SEQ ID NO: 36, MGC10561, LMX1A, SENP3, GS1, TITF1, SEQ ID NO: 42, DDX51, SEQ ID NO: 117, SEQ ID NO: 46, O60279, and SEQ ID NO: 48 as markers for the detection of breast cancer cells within blood or blood derived fluids by differentiation of breast cancer cells from peripheral blood lymphocytes. Said use of the genes and/or sequences may be enabled by means of any analysis of the expression of the gene, by means of mRNA expression analysis or protein expression analysis. However, in the most preferred embodiment of the invention, the detection of breast cell proliferative disorders is enabled by means of analysis of the methylation status of said genes or genomic sequences and their promoter or regulatory elements. Methods for the methylation analysis of genes are described herein.

[0133] In said embodiment it is further preferred that the expression level of only one gene or genomic sequence from the group consisting FABP3, RASSF1A, MSF, PRDM6, LMX1A, SEQ ID NO: 4, SCGB3A1, SLIT2, NR2E1, EYA4, PRDM2, SERPINB5, TWIST, STAT1, ALX4, IGFBP7, DAPK1, THBS1, PLAU, SEQ ID NO: 20, SEQ ID NO: 38, SEQ ID NO: 8, SEQ ID NO: 37, SEQ ID NO: 10, SEQ ID NO: 35, SEQ ID NO: 47, SEQ ID NO: 6, LIMK-1 and SEQ ID NO: 46 is analyzed for the detection of breast cancer cells within blood or blood derived fluids by differentiation of breast cancer cells from peripheral blood lymphocytes. Said use of the genes and/or sequences may be enabled by means of any analysis of the expression of the gene, by means of mRNA expression analysis or protein expression analysis. However, in the most preferred embodiment of the invention, the detection of breast cell proliferative disorders is enabled by means of analysis of the methylation status of said genes or genomic sequences and their promoter or regulatory elements. Methods for the methylation analysis of genes are described herein.

[0134] In one embodiment the method discloses the use of one or more genes or genomic sequences selected from the group consisting of APC, ARH1/NOEY2, CCND2, CDKN1A, CDKN2A, SEQ ID NO: 9, SEQ ID NO: 2, EYA4, FHIT, GSTP1, HIC1, IGFBP7, MLH1, PGR, SERPINB5, RARB, SOD2, TERT, TGFBR2, THRB, TIMP3, TP73, CDH13, THBS1, TMS1/ASC, ESR1, APAF1, CASP8, SYK, HOXA5, FABP3, RASSF1A, SEQ ID NO: 3, RARA, TWIST, ESR2, PLAU, SEQ ID NO: 4, SNCG, SLC19A1, GJB2, SLIT2, IGSF4, MCT1, HS3ST2, PRDM2, SEQ ID NO: 6, SEQ ID NO: 7, SEQ ID NO: 8, SCGB3A1, PROSTAGLANDIN E2 RECEPTOR, EP4 SUBTYPE (PROSTANOID EP4 RECEPTOR) (PGE RECEPTOR, EP4 SUBTYPE), ORPHAN NUCLEAR RECEPTOR NR5A2 (ALPHA-1-FETOPROTEIN TRANSCRIPTION FACTOR) (HEPATOCYTIC TRANSCRIPTION FACTOR) (B1-BINDING FACTOR) (HB1F) (CYP7A PROMOTER BINDING FACTOR), LIM DOMAIN KINASE 1, SASH1, S100A7, BCL1B, SEQ ID NO: 51, MGC34831, SEQ ID NO: 54, PDLIM1, MSF, SEQ ID NO: 14, SEQ ID NO: 16, SEQ ID NO: 17, SEQ ID NO: 18, SEQ ID NO: 19, NR2E1, PCDH7, DKK3, RTTN, SNAP25, G1RK2, SEQ ID NO: 28, SEQ ID NO: 29, ARL7, SEQ ID NO: 31, THH, HOXB13, SEQ ID NO: 36, LMX1A, SENP3, TITF1, SEQ ID NO: 42, DDX51, SEQ ID NO: 117, SEQ ID NO: 46, O60279, and SEQ ID NO: 48 as markers for the differentiation of DCIS from benign breast disorders. The term “benign breast disorders” as used herein shall be taken to include healthy breast tissue, fibroadenoma, fibrocystic disease and atypical ductal hyperplasia. Said use of the genes and/or sequences may be enabled by means of any analysis of the expression of the gene, by means of mRNA expression analysis or protein expression analysis. However, in the most preferred embodiment of the invention, the detection of breast cell proliferative disorders is enabled by means of analysis of the methylation status of said genes or genomic sequences and their promoter or regulatory elements. Methods for the methylation analysis of genes are described herein.

[0135] It is also preferred that the expression level of only one gene or genomic sequence from the group consisting HS3ST2, SLIT2, RASSF1A, GSTP1, GJB2, IGFBP7, CDH13, ARH1/NOEY2, SCGB3A1, FHIT, SEQ ID NO: 27, LIMK-1, SEQ ID NO: 46, SEQ ID NO: 3, SEQ ID NO: 117, SEQ ID NO: 48, SEQ ID NO: 41, SEQ ID NO: 4, SEQ ID NO: 6, and SEQ ID NO: 24 is analyzed. It is particularly preferred that this is carried out by means of methylation analysis.

[0136] In one embodiment the method discloses the use of one or more genes or genomic sequences selected from the group consisting of ARH1/NOEY2, CCND2, CDKNLA, CDKN2A, SEQ ID NO: 9, DAPK1, SEQ ID NO: 2, EYA4, FHIT, GSTP1, HIC1, IGFBP7, SERPINB5, TERT, TGFBR2, THRB, TIMP3, TP73, NME1, CDH13, THBS1, TMS1/ASC, IL6, APAF1, SYK, HOXA5, FABP3, RASSF1A, SEQ ID NO: 3, TWIST, ESR2, PLAU, STAT1, SEQ ID NO: 4, LOT1, GPC3, CLDN7, GJB2, SLIT2, IGSF4, MCT1, PRDM2, ALX4, SEQ ID NO: 5, SEQ ID NO: 6, SEQ ID NO: 7, SEQ ID NO: 8, SCGB3A1, SEQ ID NO: 1, PROSTAGLANDIN E2 RECEPTOR, EP4 SUBTYPE (PROSTANOID EP4 RECEPTOR) (PGE RECEPTOR, EP4 SUBTYPE), ORPHAN NUCLEAR RECEPTOR NR5A2 (ALPHA-1-FETOPROTEIN TRANSCRIPTION FACTOR) (HEPATOCYTIC TRANSCRIPTION FACTOR) (B1-BINDING FACTOR) (HB1F) (CYP7A PROMOTER BINDING FACTOR), LIM DOMAIN KINASE 1, BCL11B, SEQ ID NO: 51, MGC34831, SEQ ID NO: 54, PDLIM1, MSF, SEQ ID NO: 14, SEQ ID NO: 16, SEQ ID NO: 17, SEQ ID NO: 18, SEQ ID NO: 19, PRDM6, NR2E1, PCDH7, DKK3, RTTN, SNAP25, SEQ ID NO: 26, GIRK2, SEQ ID NO: 28, SEQ ID NO: 29, ARL7, SEQ ID NO: 31, THH, HOXB13, SEQ ID NO: 35, SEQ ID NO: 36, MGC10561, LMX1A, SENP3, GS1, TITF1, SEQ ID NO: 42, DDX51, SEQ ID NO: 117, SEQ ID NO: 45, SEQ ID NO: 46, O60279, and SEQ ID NO: 48 as markers for the differentiation of breast cancer from benign breast disorders. The term benign breast disorders as used herein shall be taken to include healthy breast tissue, fibroadenoma, fibrocystic disease and atypical ductal hyperplasia. Said use of the genes and/or sequences may be enabled by means of any analysis of the expression of the gene, by means of mRNA expression analysis or protein expression analysis. However, in the most preferred embodiment of the invention, the detection of breast cell proliferative disorders is enabled by means of analysis of the methylation status of said genes or genomic sequences and their promoter or regulatory elements. Methods for the methylation analysis of genes are described herein.

[0137] It is also preferred that the expression level of only one gene or genomic sequence from the group consisting SLIT2, HS3ST2, HOXA5, ARH1/NOEY2, IGFBP7, PLAU, CDH13, TIMP3, CCND2, GSTP1, SEQ ID NO: 117, LIMK-1, SEQ ID NO: 46, SEQ ID NO: 6, SEQ ID NO: 7, SEQ ID NO: 3, SEQ ID NO: 41, SEQ ID NO: 27, SEQ ID NO: 31, and SEQ ID NO: 4 is analyzed. It is particularly preferred that this is carried out by means of methylation analysis.

[0138] Aberrant levels of mRNA expression of the genes, genomic sequences or genes regulated by genomic sequences according to Table 3 are associated with breast cell proliferative disorders. Accordingly, decreased levels of expression of said all of said genes or sequences with the exception of PRDM2 and S100A7 are associable with the development of breast cancers and other breast cell proliferative disorders. Increased levels of expression of PRDM2 and S100A7 are associable with the development of breast cancers and other breast cell proliferative disorders.

[0139] To detect the presence of mRNA encoding a gene or genomic sequence in a detection system for breast cancer, a sample is obtained from a patient. The sample can be a tissue biopsy sample or a sample of blood, plasma, serum or the like. The sample may be treated to extract the nucleic acids contained therein. The resulting nucleic acid from the sample is subjected to gel electrophoresis or other separation techniques. Detection involves contacting the nucleic acids and in particular the mRNA of the sample with a DNA sequence serving as a probe to form hybrid duplexes. The stringency of hybridization is determined by a number of factors during hybridization and during the washing procedure, including temperature, ionic strength, length of time and concentration of formamide. These factors are outlined in, for example, Sambrook et al. (Molecular Cloning: A Laboratory Manual, 2d ed., 1989). Detection of the resulting duplex is usually accomplished by the use of labeled probes. Alternatively, the probe may be unlabeled, but may be detectable by specific binding with a ligand which is labeled, either directly or indirectly. Suitable labels and methods for labeling probes and ligands are known in the art, and include, for example, radioactive labels which may be incorporated by known methods (e.g., nick translation or kinasing), biotin, fluorescent groups, chemiluminescent groups (e.g., dioxetanes, particularly triggered dioxetanes), enzymes, antibodies, and the like.

[0140] In order to increase the sensitivity of the detection in a sample of mRNA transcribed from the gene or genomic sequence, the technique of reverse transcription/polymerization chain reaction can be used to amplify cDNA transcribed from the mRNA. The method of reverse transcription/PCR is well known in the art (for example, see Watson and Fleming, supra).

[0141] The reverse transcription/PCR method can be performed as follows. Total cellular RNA is isolated by, for example, the standard guanidium isothiocyanate method and the total RNA is reverse transcribed. The reverse transcription method involves synthesis of DNA on a template of RNA using a reverse transcriptase enzyme and a 3′ end primer. Typically, the primer contains an oligo(dT) sequence. The cDNA thus produced is then amplified using the PCR method and specific primers. (Belyavsky et al, Nucl Acid Res 17:2919-2932, 1989; Krug and Berger, Methods in Enzymology, Academic Press, N.Y., Vol. 152, pp. 316-325, 1987 which are incorporated by reference)

[0142] The present invention may also be described in certain embodiments as a kit for use in detecting a breast cell proliferative disorder state through testing of a biological sample. A representative kit may comprise one or more nucleic acid segments that selectively hybridize to the mRNA and a container for each of the one or more nucleic acid segments. In certain embodiments the nucleic acid segments may be combined in a single tube. In further embodiments, the nucleic acid segments may also include a pair of primers for amplifying the target mRNA. Such kits may also include any buffers, solutions, solvents, enzymes, nucleotides, or other components for hybridization, amplification or detection reactions. Preferred kit components include reagents for reverse transcription-PCR, in-situ hybridization, Northern analysis and/or RPA

[0143] The present invention further provides for methods to detect the presence of the polypeptide encoded by said genes or gene sequences in a sample obtained from a patient.

[0144] Aberrant levels of polypeptide expression of the polypeptides encoded by the genes, genomic sequences or genes regulated by genomic sequences of the group consisting all genes and genomic sequences of genomic regions listed in Table 3 are associated with breast carcinoma. Accordingly over expression of said polypeptides with the exception of polypeptides encoded by the PRDM2 and S100A7 genes are associable with the development of breast carcinoma and other breast cell proliferative disorders. Under expression of PRDM2 and S100A7 are associable with the development of breast cancers and other breast cell proliferative disorders.

[0145] Any method known in the art for detecting proteins can be used. Such methods include, but are not limited to immunodiffusion, immunoelectrophoresis, immunochemical methods, binder-ligand assays, immunohistochemical techniques, agglutination and complement assays. (for example see Basic and Clinical Immunology, Sites and Terr, eds., Appleton and Lange, Norwalk, Conn. pp 217-262, 1991 which is incorporated by reference). Preferred are binder-ligand immunoassay methods including reacting antibodies with an epitope or epitopes and competitively displacing a labeled protein or derivative thereof.

[0146] Certain embodiments of the present invention comprise the use of antibodies specific to the polypeptide encoded by the genes or genomic sequences of the group consisting all genes and genomic sequences of genomic regions as listed in Table 3, below.

[0147] Such antibodies may be useful for diagnostic and prognostic applications in detecting the disease state, by comparing a patient's levels of breast disease marker expression to expression of the same markers in normal individuals. In certain embodiments production of monoclonal or polyclonal antibodies can be induced by the use of the coded polypeptide as antigene. Such antibodies may in turn be used to detect expressed proteins as markers for human disease states. The levels of such proteins present in the peripheral blood or tissue sample of a patient may be quantified by conventional methods. Antibody-protein binding may be detected and quantified by a variety of means known in the art, such as labeling with fluorescent or radioactive ligands. The invention further comprises kits for performing the above-mentioned procedures, wherein such kits contain antibodies specific for the investigated polypeptides.

[0148] Numerous competitive and non-competitive protein binding immunoassays are well known in the art. Antibodies employed in such assays may be unlabeled, for example as used in agglutination tests, or labeled for use a wide variety of assay methods. Labels that can be used include radionuclides, enzymes, fluorescers, chemiluminescers, enzyme substrates or co-factors, enzyme inhibitors, particles, dyes and the like for use in radioimmunoassay (RIA), enzyme immunoassays, e.g., enzyme-linked immunosorbent assay (ELISA), fluorescent immunoassays and the like. Polyclonal or monoclonal antibodies or epitopes thereof can be made for use in immunoassays by any of a number of methods known in the art. One approach for preparing antibodies to a protein is the selection and preparation of an amino acid sequence of all or part of the protein, chemically synthesizing the sequence and injecting it into an appropriate animal, usually a rabbit or a mouse (Milstein and Kohler Nature 256:495-497, 1975; Gulfre and Milstein, Methods in Enzymology: Immunochemical Techniques 73:1-46, Langone and Banatis eds., Academic Press, 1981 which are incorporated by reference). Methods for preparation of the polypeptides or epitopes thereof include, but are not limited to chemical synthesis, recombinant DNA techniques or isolation from biological samples.

[0149] In a further embodiment the present invention is based upon the analysis of methylation levels within two or more genes or genomic sequences taken from the group consisting all genes and genomic sequences of genomic regions listed in Table 3 and/or their regulatory sequences. It is further preferred that the sequences of said genes or genomic sequences are as according to SEQ ID NO: 1 to SEQ ID NO: 118.

[0150] Particular embodiments of the present invention provide a novel application of the analysis of methylation status, levels and/or patterns within said sequences that enables a precise detection and/or characterization of breast cell proliferative disorders. Early detection of breast cell proliferative disorders is directly linked with disease prognosis, and the disclosed method thereby enables the physician and patient to make early and more informed treatment decisions.

### Further Improvements

[0151] The present invention provides novel uses for genomic sequences selected from the group consisting of SEQ ID NO: 1 to SEQ ID NO: 118. Additional embodiments provide modified variants, in particular chemically modified variants, of SEQ ID NO: 1 to SEQ ID NO: 118, as well as oligonucleotides and/or PNA-oligomers for analysis of cytosine methylation patterns within the group consisting SEQ ID NO: 1 to SEQ ID NO: 118.

[0152] An objective of the invention comprises analysis of the methylation state of one or more CpG dinucleotides within at least one of the genomic sequences selected from the group consisting of SEQ ID NO: 1 to SEQ ID NO: 118 and sequences complementary thereto.

[0153] The disclosed invention provides treated nucleic acids, derived from genomic SEQ ID NO: 1 to SEQ ID NO: 118, wherein the treatment is suitable to convert at least one unmethylated cytosine base of the genomic DNA sequence to uracil or another base that is detectably dissimilar to cytosine in terms of hybridization. The genomic sequences in question may comprise one, or more, consecutive or random methylated CpG positions. Said treatment preferably comprises use of a reagent selected from the group consisting of bisulfite, hydrogen sulfite, disulfite, and combinations thereof. In a preferred embodiment the invention provides a non-naturally occurring modified nucleic acid comprising a sequence of at least 16 contiguous nucleotide bases in length of a sequence selected from the group consisting of SEQ ID NO: 493 TO SEQ ID NO: 964, wherein said sequence comprises at least one CpG, TpA or CpA dinucleotide and sequences complementary thereto. The sequences of SEQ ID NO: 493 TO SEQ ID NO: 964 provide non-naturally occurring modified versions of the nucleic acid according to SEQ ID NO: 1 to SEQ ID NO: 118, wherein the modification of each genomic sequence results in the synthesis of a nucleic acid having a sequence that is unique and distinct from said genomic sequence as follows. Particularly preferred is a nucleic acid comprising a sequence that is not identical to a part of human genomic DNA, including human genomic DNA comprising one or more methylated CpG positions.

[0154] For each sense strand genomic DNA, e.g., SEQ ID NO: 1, four converted versions are disclosed. A first version wherein “C” is converted to “T,” but “CpG” remains “CpG” (i.e., corresponds to case where, for the genomic sequence, all “C” residues of CpG dinucleotide sequences are methylated and are thus not converted); a second version discloses the complement of the disclosed genomic DNA sequence (i.e. antisense strand), wherein “C” is converted to “T,” but “CpG” remains “CpG” (i.e., corresponds to case where, for all “C” residues of CpG dinucleotide sequences are methylated and are thus not converted). The ‘upmethylated’ converted sequences of SEQ ID NO: 1 to SEQ ID NO: 118 correspond to SEQ ID NO: 493 to SEQ ID NO: 728. A third chemically converted version of each genomic sequences is provided, wherein “C” is converted to “T” for all “C” residues, including those of “CpG” dinucleotide sequences (i.e., corresponds to case where, for the genomic sequences, all “C” residues of CpG dinucleotide sequences are unmethylated); a final chemically converted version of each sequence, discloses the complement of the disclosed genomic DNA sequence (i.e. antisense strand), wherein “C” is converted to “T” for all “C” residues, including those of “CpG” dinucleotide sequences (i.e., corresponds to case where, for the complement (antisense strand) of each genomic sequence, all “C” residues of CpG dinucleotide sequences are unmethylated). The ‘downmethylated’ converted sequences of SEQ ID NO: 1 to SEQ ID NO: 118 correspond to SEQ ID NO: 729 to SEQ ID NO: 964.

[0155] In an alternative preferred embodiment, the method according to the invention comprises the use of an oligonucleotide or oligomer for detecting the cytosine methylation state within genomic or treated (chemically modified) DNA, according to SEQ ID NO: 1 to SEQ ID NO: 964. Said oligonucleotide or oligomer comprising a nucleic acid sequence having a length of at least nine (9) nucleotides which hybridizes, under moderately stringent or stringent conditions (as defined herein above), to a treated nucleic acid sequence according to SEQ ID NO: 493 to SEQ ID NO: 964 and/or sequences complementary thereto, or to a genomic sequence according to SEQ ID NO: 1 to SEQ ID NO: 118 and/or sequences complementary thereto.

[0156] Thus, the present invention provides nucleic acid molecules (e.g., oligonucleotides and peptide nucleic acid (PNA) molecules (PNA-oligomers) having a length of at least nine (9) nucleotides that hybridize under moderately stringent and/or stringent hybridization conditions to all or a portion of the sequences SEQ ID NO: 1 to SEQ ID NO: 964, or to the complements thereof.

[0157] Particularly preferred are oligonucleotides and peptide nucleic acid (PNA) molecules that hybridize under moderately stringent and/or stringent hybridization conditions to all or a portion of the sequences SEQ ID NO: 493 to SEQ ID NO: 964, or to the complements thereof wherein said sequence comprises at least one CpG, TpA or CpA dinucleotide and furthermore wherein said sequence is not identical to a part of human genomic DNA, including human genomic DNA comprising one or more methylated CpG positions.

[0158] The hybridizing portion of the hybridizing nucleic acids is typically at least 9, 15, 20, 25, 30 or 35 nucleotides in length. However, longer molecules have inventive utility, and are thus within the scope of the present invention.

[0159] Preferably, the hybridizing portion of the inventive hybridizing nucleic acids is at least 95%, or at least 98%, or 100% identical to the sequence, or to a portion thereof of SEQ ID NO: 1 to SEQ ID NO: 964, or to the complements thereof.

[0160] Hybridizing nucleic acids of the type described herein can be used, for example, as a primer (e.g., a PCR primer), or a diagnostic and/or prognostic probe or primer. Preferably, hybridization of the oligonucleotide probe to a nucleic acid sample is performed under stringent conditions and the probe is 100% identical to the target sequence. Nucleic acid duplex or hybrid stability is expressed as the melting temperature or Tm, which is the temperature at which a probe dissociates from a target DNA. This melting temperature is used to define the required stringency conditions.

[0161] For target sequences that are related and substantially identical to the corresponding sequence of SEQ ID NO: 1 to SEQ ID NO: 964 (such as allelic variants and SNPs), rather than identical, it is useful to first establish the lowest temperature at which only homologous hybridization occurs with a particular concentration of salt (e.g., SSC or SSPE). Then, assuming that 1% mismatching results in a 1° C. decrease in the Tm, the temperature of the final wash in the hybridization reaction is reduced accordingly (for example, if sequences having >95% identity with the probe are sought, the final wash temperature is decreased by 5° C.). In practice, the change in Tm can be between 0.5° C. and 1.5° C. per 1% mismatch.

[0162] Examples of inventive oligonucleotides of length X (in nucleotides), as indicated by polynucleotide positions with reference to, e.g., SEQ ID NO: 1, include those corresponding to sets (sense and antisense sets) of consecutively overlapping oligonucleotides of length X, where the oligonucleotides within each consecutively overlapping set (corresponding to a given X value) are defined as the finite set of Z oligonucleotides from nucleotide positions:

n to (n+(X−1));
where n=1, 2, 3, . . . (Y−(X−1));
where Y equals the length (nucleotides or base pairs) of SEQ ID NO: 1 (6435);
where X equals the common length (in nucleotides) of each oligonucleotide in the set (e.g.,
X=20 for a set of consecutively overlapping 20-mers); and where the number (Z) of consecutively overlapping oligomers of length X for a given SEQ ID NO of length Y is equal to Y−(X−1).

[0163] For example Z=6435−19=6416 for either sense or antisense sets of SEQ ID NO: 1, where X=20.

[0164] Examples of inventive 20-mer oligonucleotides include the following set of 6416 oligomers (and the antisense set complementary thereto), indicated by polynucleotide positions with reference to SEQ ID NO: 1:1-20, 2-21, 3-22, 4-23, 5-24, etc. . . . 6416-6435.

[0165] Likewise, examples of inventive 25-mer oligonucleotides include the following set of 6410 oligomers (and the antisense set complementary thereto), indicated by polynucleotide positions with reference to SEQ ID NO: 1:1-25, 2-26, 3-27, 4-28, 5-29, etc. . . . 6408-6433, 6409-6434 and 6410-6435.

[0166] Preferably, the set is limited to those oligomers that comprise at least one CpG, TpG or CpA dinucleotide.

[0167] The present invention encompasses, for each of SEQ ID NO: 1 to SEQ ID NO: 964 (sense and antisense), multiple consecutively overlapping sets of oligonucleotides or modified oligonucleotides of length X, where, e.g., X=9, 10, 17, 20, 22, 23, 25, 27, 30 or 35 nucleotides.

[0168] The oligonucleotides or oligomers according to the present invention constitute effective tools useful to ascertain genetic and epigenetic parameters of the genomic sequence corresponding to SEQ ID NO: 1 to SEQ ID NO: 118. Preferred sets of such oligonucleotides or modified oligonucleotides of length X are those consecutively overlapping sets of oligomers corresponding to SEQ ID NO: 1 to SEQ ID NO: 964 (and to the complements thereof). Preferably, said oligomers comprise at least one CpG, TpG or CpA dinucleotide.

[0169] Particularly preferred oligonucleotides or oligomers according to the present invention are those in which the cytosine of the CpG dinucleotide (or of the corresponding converted TpG or CpA dinculeotide) sequences is within the middle third of the oligonucleotide; that is, where the oligonucleotide is, for example, 13 bases in length, the CpG, TpG or CpA dinucleotide is positioned within the fifth to ninth nucleotide from the 5′-end.

[0170] The oligonucleotides of the invention can also be modified by chemically linking the oligonucleotide to one or more moieties or conjugates to enhance the activity, stability or detection of the oligonucleotide. Such moieties or conjugates include chromophores, fluorophors, lipids such as cholesterol, cholic acid, thioether, aliphatic chains, phospholipids, polyamines, polyethylene glycol (PEG), palmityl moieties, and others as disclosed in, for example, U.S. Pat. Nos. 5,514,758, 5,565,552, 5,567,810, 5,574,142, 5,585,481, 5,587,371, 5,597,696 and 5,958,773. The probes may also exist in the form of a PNA (peptide nucleic acid) which has particularly preferred pairing properties. Thus, the oligonucleotide may include other appended groups such as peptides, and may include hybridization-triggered cleavage agents (Krol et al., BioTechniques 6:958-976, 1988) or intercalating agents (Zon, Pharm. Res. 5:539-549, 1988). To this end, the oligonucleotide may be conjugated to another molecule, e.g., a chromophore, fluorophore, peptide, hybridization-triggered cross-linking agent, transport agent, hybridization-triggered cleavage agent, etc.

[0171] The oligonucleotide may also comprise at least one art-recognized modified sugar and/or base moiety, or may comprise a modified backbone or non-natural internucleoside linkage. The oligonucleotides or oligomers according to particular embodiments of the present invention are typically used in ‘sets,’ which contain at least one oligomer for analysis of each of the CpG dinucleotides of genomic sequences SEQ ID NO: 1 to SEQ ID NO: 118 and sequences complementary thereto, or to the corresponding CpG, TpG or CpA dinucleotide within a sequence of the treated nucleic acids according to SEQ ID NO: 493 to SEQ ID NO: 964 and sequences complementary thereto. However, it is anticipated that for economic or other factors it may be preferable to analyze a limited selection of the CpG dinucleotides within said sequences, and the content of the set of oligonucleotides is altered accordingly.

[0172] Therefore, in particular embodiments, the present invention provides a set of at least two (2) (oligonucleotides and/or PNA-oligomers) useful for detecting the cytosine methylation state in treated genomic DNA (SEQ ID NO: 493 to SEQ ID NO: 964), or in genomic DNA (SEQ ID NO: 1 to SEQ ID NO: 118 and sequences complementary thereto). These probes enable diagnosis and/or classification of genetic and epigenetic parameters of breast cell proliferative disorders. The set of oligomers may also be used for detecting single nucleotide polymorphisms (SNPs) in treated genomic DNA (SEQ ID NO: 493 to SEQ ID NO: 964), or in genomic DNA (SEQ ID NO: 1 to SEQ ID NO: 118 and sequences complementary thereto).

[0173] In preferred embodiments, at least one, and more preferably all members of a set of oligonucleotides is/are bound to a solid phase.

[0174] In further embodiments, the present invention provides a set of at least two (2) oligonucleotides that are used as ‘primer’ oligonucleotides for amplifying DNA sequences of one of SEQ ID NO: 1-118 and SEQ ID NO: 493 to SEQ ID NO: 964 and sequences complementary thereto, or segments thereof.

[0175] It is anticipated that the oligonucleotides may constitute all or part of an “array” or “DNA chip” (i.e., an arrangement of different oligonucleotides and/or PNA-oligomers bound to a solid phase). Such an array of different oligonucleotide- and/or PNA-oligomer sequences can be characterized, for example, in that it is arranged on the solid phase in the form of a rectangular or hexagonal lattice. The solid-phase surface may be composed of silicon, glass, polystyrene, aluminum, steel, iron, copper, nickel, silver, or gold. Nitrocellulose as well as plastics such as nylon, which can exist in the form of pellets or also as resin matrices, may also be used. An overview of the Prior Art in oligomer array manufacturing can be gathered from a special edition of Nature Genetics (Nature Genetics Supplement, Volume 21, January 1999, and from the literature cited therein). Fluorescently labeled probes are often used for the scanning of immobilized DNA arrays. The simple attachment of Cy3 and Cy5 dyes to the 5′-OH of the specific probe are particularly suitable for fluorescence labels. The detection of the fluorescence of the hybridized probes may be carried out, for example, via a confocal microscope. Cy3 and Cy5 dyes, besides many others, are commercially available.

[0176] It is also anticipated that the oligonucleotides, or particular sequences thereof, may constitute all or part of an “virtual array” wherein the oligonucleotides, or particular sequences thereof, are used, for example, as ‘specifiers’ as part of, or in combination with a diverse population of unique labeled probes to analyze a complex mixture of analytes. Such a method, for example is described in US 2003/0013091 (U.S. Ser. No. 09/898,743, published 16 Jan. 2003). In such methods, enough labels are generated so that each nucleic acid in the complex mixture (i.e., each analyte) can be uniquely bound by a unique label and thus detected (each label is directly counted, resulting in a digital read-out of each molecular species in the mixture).

[0177] It is particularly preferred that the oligomers according to the invention are utilized for at least one of: detection of; detection and differentiation between or among subclasses of; diagnosis of; prognosis of; treatment of; monitoring of; and treatment and monitoring of breast cell proliferative disorders. This is enabled by use of said sets for the differentiation and/or detection of the tissue types according to Table 14. Particularly preferred are those sets of oligomer that comprise at least two oligonucleotides selected from one of the following sets of oligonucleotides.

[0178] In one embodiment of the method, breast cancer tissue is detected. This is achieved by analysis of the CpG methylation status of at least one target sequence comprising, or hybridizing under stringent conditions to at least 16 contiguous nucleotides of a gene or sequence selected from the group consisting of APC, ARH1/NOEY2, BRCA2, CCND2, CDKN1A, CDKN2A, SEQ ID NO: 9, DAPK1, SEQ ID NO: 2, EYA4, FHIT, GSTP1, HIC1, IGFBP7, MLH1, PGR, SERPINB5, RARB, SFN, SOD2, TGFBR2, THRB, TIMP3, TP73, NME1, CDH13, THBS1, TMS1/ASC, ESR1, IL6, APAF1, CASP8, SYK, HOXA5, FABP3, RASSF1A, SEQ ID NO: 3, RARA, TWIST, ESR2, PLAU, STAT1, SEQ ID NO: 4, BRCA1, LOT1, PRSS8, SNCG, TPM1, GPC3, CLDN7, SLC19A1, GJB2, SLIT2, IGSF4, MCT1, HS3ST2, PRDM2, ALX4, SEQ ID NO: 5, SEQ ID NO: 6, SEQ ID NO: 7, SEQ ID NO: 8, SCGB3A1, SEQ ID NO: 1, PROSTAGLANDIN E2 RECEPTOR, EP4 SUBTYPE (PROSTANOID EP4 RECEPTOR) (PGE RECEPTOR, EP4 SUBTYPE), ORPHAN NUCLEAR RECEPTOR NRSA2 (ALPHA-1-FETOPROTEIN TRANSCRIPTION FACTOR) (HEPATOCYTIC TRANSCRIPTION FACTOR) (B1-BINDING FACTOR) (HB1F) (CYP7A PROMOTER BINDING FACTOR), LIM DOMAIN KINASE 1, SASH1, S100A7, BCL11B, SEQ ID NO: 51, MGC34831, SEQ ID NO: 54, PDLIM1, MSF, SEQ ID NO: 14, SEQ ID NO: 15, SEQ ID NO: 16, SEQ ID NO: 17, SEQ ID NO: 18, SEQ ID NO: 19, PRDM6, RAP2B, NR2E1, PCDH7, DKK3, RTTN, SNAP25, SEQ ID NO: 26, GIRK2, SEQ ID NO: 28, SEQ ID NO: 29, ARL7, SEQ ID NO: 31, THH, HOXB13, SEQ ID NO: 35, MGC10561, LMX1A, SENP3, GS1, TITF1, SEQ ID NO: 42, DDX51, SEQ ID NO: 117, SEQ ID NO: 45, SEQ ID NO: 46, O60279, and SEQ ID NO: 48 and complements thereof.

[0179] In a further embodiment the CpG methylation status of at least one target sequence comprising, or hybridizing under stringent conditions to at least 16 contiguous nucleotides of a gene or sequence selected from the group consisting of PRDM2, PLAU, GSTP1, SLIT2, CCND2, HOXA5, RASSF1A, HS3ST2, ARH1/NOEY2, SCGB3A1, LIMK-1, SEQ ID NO: 6, SEQ ID NO: 3, SEQ ID NO: 18, SEQ ID NO: 7, SEQ ID NO: 41, SEQ ID NO: 22, SEQ ID NO: 46, SEQ ID NO: 13, and SEQ ID NO: 31 and complements thereof.

[0180] In both cases this is preferably achieved by use of a set consisting of at least one oligonucleotide, and more preferably at least two selected from one of the groups consisting of 1475-1477, 1477, 1478, 1478, 1479, 1479, 1480, 1480-1497, 1497, 1498, 1498, 1499, 1499, 1500, 1500, 1501, 1501, 1502, 1502-1511, 1511, 1512, 1512-1527, 1527, 1528, 1528-1557, 1557, 1558, 1558-1567, 1567, 1568, 1568, 1569, 1569, 1570, 1570-1573, 1573 , 1574, 1574-1607, 1607, 1608, 1608-1619, 1619, 1620, 1620-1623, 1623, 1624, 1624-1639, 1639, 1640, 1640-1655, 1655, 1656, 1656-1693, 1693, 1694, 1694, 1695, 1695, 1696, 1696, 1697, 1697-1702, 1702, 1703, 1703-1706, 1706, 1706, 1706, 1707-1720, 1720, 1721, 1721-1724, 1724, 1725, 1725-1728, 1728, 1729, 1729-1734, 1734, 1735, 1735-1738, 1738, 1739, 1739-1752, 1752, 1753, 1753-1758, 1758, 1759, 1759′-1762, 1762, 1763, 1763-1770, 1770, 1771, 1771-1778, 1778, 1779, 1779, 1780, 1780, 1781, 1781-1790, 1790, 1791, 1791-1798, 1798, 1799, 1799-1838, 1838, 1839, 1839, 1840, 1840, 1841, 1841-1852, 1852, 1853, 1853, 1854, 1854, 1855, 1855-1870, 1870, 1871, 1871-1874, 1874, 1875, 1875-1878, 1878, 1879, 1879, 1880, 1880, 1881, 1881, 1882, 1882, 1883, 1883-1886, 1886, 1887, 1887-1890, 1890, 1891, 1891-1906, 1906, 1907, 1907-1940, 1940, 1941, 1941, 1942, 1942, 1943, 1943-1946, 1946, 1947, 1947-1952, 1952, 1953, 1953-1966, 1966, 1967, 1967, 1968, 1968, 1969, 1969, 1970, 1970, 1971, 1971-1978, 1978, 1979, 1979-1982, 1982, 1983, 1983-1992, 1992, 1993, 1993-1998, 1998, 1999, 1999-2006, 2006, 2007, 2007-2016, 2016, 2017, 2017-2022, 2022, 2023, 2023-2030, 2030, 2031, 2031-2036, 2036, 2037, 2037-2050, 2050, 2051, 2051-2060, 2060, 2061, 2061-2070, 2070, 2071, 2071-2076, 2076, 2077, 2077-2104, 2104, 2105, 2105, 2106, 2106, 2107, 2107-2114, 2114, 2115, 2115-2128, 2128, 2129, 2129, 2130, 2130, 2131, 2131-2134, 2134, 2135, 2135, 2136, 2136, 2137, 2137, 2138, 2138, 2139, and 2139.

[0181] In one embodiment of the method, breast cancer tissue is differentiated from other cancers. This is achieved by analysis of the CpG methylation status of at least one target sequence comprising, or hybridizing under stringent conditions to at least 16 contiguous nucleotides of a gene or sequence selected from the group consisting of APC, ARH1/NOEY2, BRCA2, CCND2, CDKN1A, CDKN2A, SEQ ID NO: 9, DAPK1, SEQ ID NO: 2, EYA4, FHIT, GSTP1, HIC1, IGFBP7, MLH1, PGR, SERPINB5, RARB, SFN, SOD2, TGFBR2, THRB, TIMP3, TP73, NME1, CDH13, THBS1, TMS1/ASC, ESR1, IL6, APAF1, CASP8, SYK, HOXA5, FABP3, RASSF1A, SEQ ID NO: 3, RARA, TWIST, ESR2, PLAU, STAT1, SEQ ID NO: 4, BRCA1, LOT1, PRSS8, SNCG, TPM1, GPC3, CLDN7, SLC19A1, GJB2, SLIT2, IGSF4, MCT1, HS3ST2, PRDM2, ALX4, SEQ ID NO: 5, SEQ ID NO: 6, SEQ ID NO: 7, SEQ ID NO: 8, SCGB3A1, SEQ ID NO: 1, PROSTAGLANDIN E2 RECEPTOR, EP4 SUBTYPE (PROSTANOID EP4 RECEPTOR) (PGE RECEPTOR, EP4 SUBTYPE), ORPHAN NUCLEAR RECEPTOR NR5A2 (ALPHA-1-FETOPROTEIN TRANSCRIPTION FACTOR) (HEPATOCYTIC TRANSCRIPTION FACTOR) (B1-BINDING FACTOR) (HB1F) (CYP7A PROMOTER BINDING FACTOR), LIM DOMAIN KINASE 1, SASH1, S100A7, BCL11B, SEQ ID NO: 51, MGC34831, SEQ ID NO: 54, PDLIM1, MSF, SEQ ID NO: 14, SEQ ID NO: 15, SEQ ID NO: 16, SEQ ID NO: 17, SEQ ID NO: 18, SEQ ID NO: 19, PRDM6, RAP2B, NR2E1, PCDH7, DKK3, RTTN, SNAP25, SEQ ID NO: 26, GIRK2, SEQ ID NO: 28, SEQ ID NO: 29, ARL7, SEQ ID NO: 31, THH, HOXB13, SEQ ID NO: 35, MGC10561, LMX1A, SENP3, GS1, TITF1, SEQ ID NO: 42, DDX51, SEQ ID NO: 117, SEQ ID NO: 45, SEQ ID NO: 46, O60279, and SEQ ID NO: 48 and complements thereof. In a further embodiment the CpG methylation status of at least one target sequence comprising, or hybridizing under stringent conditions to at least 16 contiguous nucleotides of a gene or sequence selected from the group consisting PRDM2, GSTP1, ALX4, HOXA5, PLAU, RASSF1A, IGSF4, SLIT2, DAPK1, CDKN1A, SEQ ID NO: 38, SEQ ID NO: 35, LIMK-1, SEQ ID NO: 39, SEQ ID NO: 10, SEQ ID NO: 26, SEQ ID NO: 8, SEQ ID NO: 22, SEQ ID NO: 18, and SEQ ID NO: 47 and complements thereof.

[0182] In both cases this is preferably achieved by use of a set consisting of at least one oligonucleotide, and more preferably at least two selected from one of the groups consisting of 1475, 1476, 1485-1497, 1497, 1498, 1498, 1499, 1499, 1500, 1500, 1501, 1501, 1502, 1502-1504, 1509-1511, 1511, 1512, 1512-1522, 1525-1527, 1527, 1528, 1528-1540, 1551-1554, 1569, 1569, 1570, 1570-1573, 1573, 1574, 1574%-1580, 1585, 1586, 1591-1600, 1603, 1604, 1609-1619, 1619, 1620, 1620-1623, 1623, 1624, 1624-1626, 1629, 1630, 1633-1639, 1639, 1640, 1640-1642, 1649, 1650, 1667, 1668, 1675-1680, 1683-1688, 1710-1717, 1724, 1724, 1725, 1725-1728, 1728, 1729, 1729-1731, 1736-1738, 1738, 1739, 1739, 1748, 1749, 1752, 1752, 1753, 1753, 1760, 1761, 1764, 1765, 1774-1778, 1778, 1779, 1779, 1780, 1780, 1781, 1781-1783, 1788, 1789, 1792-1798, 1798, 1799, 1799-1801, 1804-1819, 1830, 1831, 1858-1865, 1870, 1870, 1871, 1871, 1874, 1874, 1875, 1875-1878, 1878, 1879, 1879, 1880, 1880, 1881, 1881, 1882, 1882, 1883, 1883, 1900, 1901, 1904-1906, 1906, 1907, 1907-1909, 1916, 1917, 1924-1931, 1942, 1942, 1943, 1943, 1948, 1949, 1952, 1952, 1953, 1953-1957, 1966, 1966, 1967, 1967, 1968, 1968, 1969, 1969, 1970, 1970, 1971, 1971, 1980-1982, 1982, 1983, 1983-1985, 1994-1998, 1998, 1999, 1999, 2004, 2005, 2010-2015, 2020, 2021, 2028-2030, 2030, 2031, 2031-2033, 2036, 2036, 2037, 2037-2049, 2054-2059, 2066-2070, 2070, 2071, 2071-2073, 2076, 2076, 2077, 2077, 2080-2089, 2092-2099, 2104, 2104, 2105, 2105, 2108, 2109, 2116-2119, 2130, 2130, 2131, 2131-2134, 2134, 2135, 2135, 2136, 2136, 2137, 2137, 2138, 2138, 2139, 2139, 2140, 2140, 2141, 2141-2144, 2144, 2145, 2145, 2146, 2146-2149, 2149, 2150, 2150-2154, 2163, 2164, 2169, 2170, and 2177-2180.

[0183] In one further embodiment of the method, breast cancer cells are detected against a background of blood or blood derived fluids by the differentiation of breast cancer cells from peripheral blood lymphocytes. This is achieved by analysis of the CpG methylation status of at least one target sequence comprising, or hybridizing under stringent conditions to at least 16 contiguous nucleotides of a gene or sequence selected from the group consisting APC, ARH1/NOEY2, CCND2, CDH1, CDKN1A, CDKN2A, SEQ ID NO: 9, DAPK1, SEQ ID NO: 2, EYA4, FHIT, GSTP1, HIC1, IGFBP7, PGR, SERPINB5, RARB, SFN, SOD2, TERT, TGFBR2, THRB, TIMP3, NME1, CDH13, THBS1, TMS1/ASC, ESR1, IL6, APAF1, CASP8, SYK, HOXA5, FABP3, RASSF1A, SEQ ID NO: 3, TWIST, ESR2, PLAU, STAT1, SEQ ID NO: 4, BRCA1, LOT1, PRSS8, SNCG, GPC3, CLDN7, SLC19A1, GJB2, SLIT2, IGSF4, MCT1, HS3ST2, PRDM2, ALX4, SEQ ID NO: 5, SEQ ID NO: 6, SEQ ID NO: 7, SEQ ID NO: 8, SCGB3A1, SEQ ID NO: 1, PROSTAGLANDIN E2 RECEPTOR, EP4 SUBTYPE (PROSTANOID EP4 RECEPTOR) (PGE RECEPTOR, EP4 SUBTYPE), ORPHAN NUCLEAR RECEPTOR NR5A2 (ALPHA-1-FETOPROTEIN TRANSCRIPTION FACTOR) (HEPATOCYTIC TRANSCRIPTION FACTOR) (B1-BINDING FACTOR) (HB1F) (CYP7A PROMOTER BINDING FACTOR), LIM DOMAIN KINASE 1, SASH1, S100A7, BCL11B, SEQ ID NO: 51, MGC34831, SEQ ID NO: 54, PDLIM1, MSF, SEQ ID NO: 14, SEQ ID NO: 15, SEQ ID NO: 16, SEQ ID NO: 17, SEQ ID NO: 18, SEQ ID NO: 19, PRDM6, RAP2B, NR2E1, PCDH7, DKK3, RTTN, SNAP25, SEQ ID NO: 26, GIRK2, SEQ ID NO: 28, SEQ ID NO: 29, ARL7, SEQ ID NO: 31, THH, HOXB13, SEQ ID NO: 35, SEQ ID NO: 36, MGC10561, LMX1A, SENP3, GS1, TITF1, SEQ ID NO: 42, DDX51, SEQ ID NO: 117, SEQ ID NO: 46, O60279, and SEQ ID NO: 48 and complements thereof.

[0184] In a further embodiment the CpG methylation status of at least one target sequence comprising, or hybridizing under stringent conditions to at least 16 contiguous nucleotides of a gene or sequence selected from the group consisting FABP3, RASSF1A, MSF, PRDM6, LMX1A, SEQ ID NO: 4, SCGB3A1, SLIT2, NR2E1, EYA4, PRDM2, SERPINB5, TWIST, STAT1, ALX4, IGFBP7, DAPK1, THBS1, PLAU, SEQ ID NO: 20, SEQ ID NO: 38, SEQ ID NO: 8, SEQ ID NO: 37, SEQ ID NO: 10, SEQ ID NO: 35, SEQ ID NO: 47, SEQ ID NO: 6, LIMK-1 and SEQ ID NO: 46 and complements thereof.

[0185] In both cases, this is preferably achieved by use of a set consisting of at least one oligonucleotide, and more preferably at least two selected from one of the groups consisting of 1475-1477, 1477, 1478, 1478, 1479, 1479, 1480, 1480, 1485-1497, 1497, 1498, 1498, 1501, 1501, 1502, 1502-1511, 1511, 1512, 1512-1522, 1525-1527, 1527, 1528, 1528-1540, 1543-1546, 1549-1557, 1557, 1558, 1558-1567, 1567, 1568, 1568, 1569, 1569, 1570, 1570-1572, 1583-1596, 1599, 1600, 1603, 1604, 1607, 1607, 1608, 1608-1619, 1619, 1620, 1620-1623, 1623, 1624, 1624-1626, 1631-1639, 1639, 1640, 1640, 1645, 1646, 1649-1655, 1655, 1656, 1656-1660, 1663-1668, 1671-1693, 1693, 1694, 1694, 1695, 1695, 1696, 1696, 1697, 1697-1699, 1704-1706, 1706, 1707, 1707-1720, 1720, 1721, 1721, 1724, 1724, 1725, 1725-1728, 1728, 1729, 1729-1733, 1738, 1738, 1739, 1739, 1742, 1743, 1746, 1747, 1750, 1751, 1758, 1758, 1759, 1759-1762, 1762, 1763, 1763-1770, 1770, 1771, 1771-1778, 1778, 1779, 1779, 1782-1789, 1792-1798, 1798, 1799, 1799-1838, 1838, 1839, 1839, 1840, 1840, 1841, 1841-1845, 1848-1852, 1852, 1853, 1853, 1854, 1854, 1855, 1855-1869, 1872, 1873, 1878, 1878, 1879, 1879, 1880, 1880, 1881, 1881, 1882, 1882, 1883, 1883-1885, 1888-1890; 1890, 1891, 1891-1906, 1906, 1907, 1907-1935, 1938-1940, 1940, 1941, 1941, 1942, 1942, 1943, 1943-1946, 1946, 1947, 1947-1952, 1952, 1953, 1953-1966, 1966, 1967, 1967, 1968, 1968, 1969, 1969, 1970, 1970, 1971, 1971-1973, 1976-1978, 1978, 1979, 1979-1982, 1982, 1983, 1983-1987, 1990-1992, 1992, 1993, 1993-1998, 1998, 1999, 1999-2006, 2006, 2007, 2007-2016, 2016, 2017, 2017-2022, 2022, 2023, 2023-2025, 2028-2030, 2030, 2031, 2031-2036, 2036, 2037, 2037-2049, 2052-2060, 2060, 2061, 2061-2070, 2070, 2071, 2071-2076, 2076, 2077, 2077-2104, 2104, 2105, 2105, 2106, 2106, 2107, 2107-2114, 2114, 2115, 2115-2117, 2120-2128, 2128, 2129, 2129, 2130, 2130, 2131, 2131-2134, 2134, 2135, 2135, 2136, 2136, 2137, 2137, 2138, 2138, 2139, 2139, 2140, 2140, 2141, 2141-2143, 2147-2149, 2149, 2150, 2150-2156, 2161, 2162, 2171, 2172, 2181, 2181, 2182, 2182-2187, 2187, 2188, 2188-2199, 2199, 2200, and 2200-2218.

[0186] In one embodiment of the method, DCIS is differentiated from benign breast cell proliferative disorders. This is achieved by analysis of the CpG methylation status of at least one target sequence comprising, or hybridizing under stringent conditions to at least 16 contiguous nucleotides of a gene or sequence selected from the group consisting of APC, ARH11/NOEY2, CCND2, CDKN1A, CDKN2A, SEQ ID NO: 9, SEQ ID NO: 2, EYA4, FHIT, GSTP1, HIC1, IGFBP7, MLH1, PGR, SERPINB5, RARB; SOD2, TERT, TGFBR2, THRB, TIMP3, TP73, CDH13, THBS1, TMS1/ASC, ESR1, APAF1, CASP8, SYK, HOXA5, FABP3, RASSF1A, SEQ ID NO: 3, RARA, TWIST, ESR2, PLAU, SEQ ID NO: 4, SNCG, SLC19A1, GJB2, SLIT2, IGSF4, MCT1, HS3ST2, PRDM2, SEQ ID NO: 6, SEQ ID NO: 7, SEQ ID NO: 8, SCGB3A1, PROSTAGLANDIN E2 RECEPTOR, EP4 SUBTYPE (PROSTANOID EP4 RECEPTOR) (PGE RECEPTOR, EP4 SUBTYPE), ORPHAN NUCLEAR RECEPTOR NR5A2 (ALPHA-1-FETOPROTEIN TRANSCRIPTION FACTOR) (HEPATOCYTIC TRANSCRIPTION FACTOR) (B1-BINDING FACTOR) (HB1F) (CYP7A PROMOTER BINDING FACTOR), LIM DOMAIN KINASE 1, SASH1, S100A7, BCL 11B, SEQ ID NO: 51, MGC34831, SEQ ID NO: 54, PDLIM1, MSF, SEQ ID NO: 14, SEQ ID NO: 16, SEQ ID NO: 17, SEQ ID NO: 18, SEQ ID NO: 19, NR2E1, PCDH7, DKK3, RTTN, SNAP25, GIRK2, SEQ ID NO: 28, SEQ ID NO: 29, ARL7, SEQ ID NO: 31, THH, HOXB13, SEQ ID NO: 36, LMX1A, SENP3, TITF1, SEQ ID NO: 42, DDX51, SEQ ID NO: 117, SEQ ID NO: 46, O60279, and SEQ ID NO: 48 and complements thereof.

[0187] In a further embodiment the CpG methylation status of at least one target sequence comprising, or hybridizing under stringent conditions to at least 16 contiguous nucleotides of a gene or sequence selected from the group consisting of HS3ST2, SLIT2, RASSF1A, GSTP1, GJB2, IGFBP7, CDH13, ARH1/NOEY2, SCGB3A1, FHIT, SEQ ID NO: 27, LIMK-1, SEQ ID NO: 46, SEQ ID NO: 3, SEQ ID NO: 117, SEQ ID NO: 48, SEQ ID NO: 41, SEQ ID NO: 4, SEQ ID NO: 6, and SEQ ID NO: 24 and complements thereof.

[0188] In both cases this is preferably achieved by use of a set consisting of at least one oligonucleotide, and more preferably at least two selected from one of the groups consisting of 1475-1477, 1477, 1478, 1478, 1479, 1479, 1480, 1480-1482, 1485-1497, 1497, 1498, 1498, 1501, 1501, 1502, 1502-1508, 1513, 1514, 1517, 1518, 1521-1527, 1527, 1528, 1528-1534, 1541-1544, 1547-1550, 1555-1557, 1557, 1558, 1558-1560, 1567, 1567, 1568, 1568, 1569, 1569, 1570, 1570-1573, 1573, 1574, 1574-1578, 1581-1592, 1595-1600, 1605-1607, 1607, 1608, 1608-1618, 1623, 1623, 1624, 1624-1626, 1631-1636, 1639, 1639, 1640, 1640, 1663-1668, 1671-1676, 1689, 1690, 1695, 1695, 1696, 1696, 1697, 1697-1701, 1706, 1706, 1707, 1707-1713, 1720, 1720, 1721, 1721, 1726-1728, 1728, 1729, 1729, 1732-1734, 1734, 1735, 1735, 1740, 1741, 1746-1752, 1752, 1753, 1753, 1756-1758, 1758, 1759, 1759, 1772-1778, 1778, 1779, 1779, 1780, 1780, 1781, 1781, 1784-1790, 1790, 1791, 1791-1798, 1798, 1799, 1799-1805, 1812-1835, 1842-1845, 1848, 1849, 1852, 1852, 1853, 1853, 1854, 1854, 1855, 1855-1869, 1872, 1873, 1876-1878, 1878, 1879, 1879, 1882, 1882, 1883, 1883-1886, 1886, 1887, 1887-1890, 1890, 1891, 1891-1895, 1902-1906, 1906, 1907, 1907, 1910, 1911, 1914-1923, 1932-1935, 1938-1940, 1940, 1941, 1941, 1952, 1952, 1953, 1953, 1958-1963, 1966, 1966, 1967, 1967, 1968, 1968, 1969, 1969, 1970, 1970, 1971, 1971, 1974-1977, 1980-1982, 1982, 1983, 1983-1987, 1992, 1992, 1993, 1993, 1996-1998, 1998, 1999, 1999-2005, 2010-2013, 2028-2030, 2030, 2031, 2031-2036, 2036, 2037, 2037-2039, 2042-2050, 2050, 2051, 2051, 2060, 2060, 2061, 2061-2070, 2070, 2071, 2071-2076, 2076, 2077, 2077, 2092, 2093, 2104, 2104, 2105, 2105, 2106, 2106, 2107, 2107, 2110, 2111, 2116, 2117, 2120-2127, 2130, 2130, 2131, 2131-2134, 2134, 2135, 2135, 2136, 2136, 2137, 2137, 2138, 2138, 2139, 2139, 2155, 2156, 2161, 2162, 2183, 2184, 2187, 2187, 2188, 2188, 2199, 2199, 2200, 2200-2202, and 2219-2222.

[0189] In one embodiment of the method, breast cancer is differentiated from benign breast cell proliferative disorders. This is achieved by analysis of the CpG methylation status of at least one target sequence comprising, or hybridizing under stringent conditions to at least 16 contiguous nucleotides of a gene or sequence selected from the group consisting of ARH1/NOEY2, CCND2, CDKN1A, CDKN2A, SEQ ID NO: 9, DAPK1, SEQ ID NO: 2, EYA4, FHIT, GSTP1, HIC1, IGFBP7, SERPINB5, TERT, TGFBR2, THRB, TIMP3, TP73, NME1, CDH13, THBS1, TMS1/ASC, IL6, APAF1, SYK, HOXA5, FABP3, RASSFIA, SEQ ID NO: 3, TWIST, ESR2, PLAU, STAT1, SEQ ID NO: 4, LOT1, GPC3, CLDN7, GJB2, SLIT2, IGSF4, MCT1, PRDM2, ALX4, SEQ ID NO: 5, SEQ ID NO: 6, SEQ ID NO: 7, SEQ ID NO: 8, SCGB3A1, SEQ ID NO: 1, PROSTAGLANDIN E2 RECEPTOR, EP4 SUBTYPE (PROSTANOID EP4 RECEPTOR) (PGE RECEPTOR, EP4 SUBTYPE), ORPHAN NUCLEAR RECEPTOR NR5A2 (ALPHA-1-FETOPROTEIN TRANSCRIPTION FACTOR) (HEPATOCYTIC TRANSCRIPTION FACTOR) (B1-BINDING FACTOR) (HBIF) (CYP7A PROMOTER BINDING FACTOR), LIM DOMAIN KINASE 1, BCL 11B, SEQ ID NO: 51, MGC34831, SEQ ID NO: 54, PDLIM1, MSF, SEQ ID NO: 14, SEQ ID NO: 16, SEQ ID NO: 17, SEQ ID NO: 18, SEQ ID NO: 19, PRDM6, NR2E1, PCDH7, DKK3, RTTN, SNAP25, SEQ ID NO: 26, GIRK2, SEQ ID NO: 28, SEQ ID NO: 29, ARL7, SEQ ID NO: 31, THH, HOXB13, SEQ ID NO: 35, SEQ ID NO: 36, MGC10561, LMX1A, SENP3, GS1, TITF1, SEQ ID NO: 42, DDX51, SEQ ID NO: 117, SEQ ID NO: 45, SEQ ID NO: 46, O60279, and SEQ ID NO: 48 and complements thereof.

[0190] In a further embodiment the CpG methylation status of at least one target sequence comprising, or hybridizing under stringent conditions to at least 16 contiguous nucleotides of a gene or sequence selected from the group consisting SLIT2, HS3ST2, HOXA5, ARH1/NOEY2, IGFBP7, PLAU, CDH13, TIMP3, CCND2, GSTP1, SEQ ID NO: 117, LIMK-1, SEQ ID NO: 46, SEQ ID NO: 6, SEQ ID NO: 7, SEQ ID NO: 3, SEQ ID NO: 41, SEQ ID NO: 27, SEQ ID NO: 31, and SEQ ID NO: 4 and complements thereof.

[0191] In both cases this is preferably achieved by use of a set consisting of at least one oligonucleotide, and more preferably at least two selected from one of the groups consisting of 1475, 1476, 1485-1497, 1497, 1498, 1498, 1499, 1499, 1500, 1500, 1501, 1501, 1502, 1502-1504, 1509-1511, 1511, 1512, 1512-1522, 1525-1527, 1527, 1528, 1528-1540, 1551-1554, 1569, 1569, 1570, 1570-1573, 1573, 1574, 1574-1580, 1585, 1586, 1591-1600, 1603, 1604, 1609-1619, 1619, 1620, 1620-1623, 1623, 1624, 1624-1626, 1629, 1630, 1633-1639, 1639, 1640, 1640-1642, 1649, 1650, 1667, 1668, 1675-1680, 1683-1688, 1710-1717, 1724, 1724, 1725, 1725-1728, 1728, 1729, 1729-1731, 1736-1738, 1738, 1739, 1739, 1748, 1749, 1752, 1752, 1753, 1753, 1760, 1761, 1764, 1765, 1774-1778, 1778, 1779, 1779, 1780, 1780, 1781, 1781-1783, 1788, 1789, 1792-1798, 1798, 1799, 1799-1835, 1842-1852, 1852, 1853, 1853, 1854, 1854, 1855, 1855-1870, 1870, 1871, 1871-1873, 1876-1878, 1878, 1879, 1879, 1880, 1880, 1881, 1881, 1882, 1882, 1883, 1883-1886, 1886, 1887, 1887-1890, 1890, 1891, 1891-1895, 1898, 1899, 1902-1906, 1906, 1907, 1907-1925, 1932-1940, 1940, 1941, 1941, 1942, 1942, 1943, 1943, 1958-1966, 1966, 1967, 1967, 1968, 1968, 1969, 1969, 1970, 1970, 1971, 1971-1977, 1980-1982, 1982, 1983, 1983-1987, 1992, 1992, 1993, 1993, 1998, 1998, 1999, 1999-2006, 2006, 2007, 2007, 2010-2015, 2020-2022, 2022, 2023, 2023, 2028-2030, 2030, 2031, 2031-2036, 2036, 2037, 2037-2045, 2048-2050, 2050, 2051, 2051-2057, 2060, 2060, 2061, 2061-2070, 2070, 2071, 2071-2076, 2076, 2077, 2077-2079, 2082, 2083, 2086, 2087, 2092-2101, 2104, 2104, 2105, 2105, 2106, 2106, 2107, 2107-2111, 2116, 2117, 2120-2128, 2128, 2129, 2129, 2130, 2130, 2131, 2131-2134, 2134, 2135, 2135, 2136, 2136, 2137, 2137, 2138, 2138, 2139, 2139, 2140, 2140, 2141, 2141-2144, 2144, 2145, 2145, 2146, 2146-2149, 2149, 2150, 2150-2167, 2167, 2168, 2168-2175, 2175, 2176, and 2176.

[0192] The present invention further provides a method for ascertaining genetic and/or epigenetic parameters of the genomic sequences according to SEQ ID NO: 1 to SEQ ID NO: 118 within a subject by analyzing cytosine methylation and single nucleotide polymorphisms. Said method comprising contacting a nucleic acid comprising one or more of SEQ ID NO: 1 to SEQ ID NO: 118 in a biological sample obtained from said subject with at least one reagent or a series of reagents, wherein said reagent or series of reagents, distinguishes between methylated and non-methylated CpG dinucleotides within the target nucleic acid.

[0193] Preferably, said method comprises the following steps: In thefirst step, a sample of the tissue to be analyzed is obtained. The source may be any suitable source, such as cell lines, histological slides, biopsies, paraffin-embedded tissue, body fluids, blood plasma, blood serum, whole blood, isolated blood cells, cells isolated from the blood and all possible combinations thereof. It is preferred that said sources of DNA are body fluids selected from the group consisting nipple aspirate fluid, lymphatic fluid, ductal lavage fluid, fine needle aspirate, blood plasma, blood serum, whole blood, isolated blood cells, cells isolated from the blood.

[0194] The genomic DNA is then isolated from the sample. Genomic DNA may be isolated by any means standard in the art, including the use of commercially available kits. Briefly, wherein the DNA of interest is encapsulated in by a cellular membrane the biological sample must be disrupted and lysed by enzymatic, chemical or mechanical means. The DNA solution may then be cleared of proteins and other contaminants e.g. by digestion with proteinase K. The genomic DNA is then recovered from the solution. This may be carried out by means of a variety of methods including salting out, organic extraction or binding of the DNA to a solid phase support. The choice of method will be affected by several factors including time, expense and required quantity of DNA. Once the nucleic acids have been extracted, the genomic double stranded DNA is used in the analysis.

[0195] In the second step of the method, the genomic DNA sample is treated in such a manner that cytosine bases which are unmethylated at the 5′-position are converted to uracil, thymine, or another base which is dissimilar to cytosine in terms of hybridization behavior. This will be understood as ‘pretreatment’ or ‘treatment’ herein.

[0196] This is preferably achieved by means of treatment with a bisulfite reagent. The term “bisulfite reagent” refers to a reagent comprising bisulfite, disulfite, hydrogen sulfite or combinations thereof, useful as disclosed herein to distinguish between methylated and unmethylated CpG dinucleotide sequences. Methods of said treatment are known in the art (e.g. PCT/EP2004/011715, which is incorporated by reference in its entirety). It is preferred that the bisulfite treatment is conducted in the presence of denaturing solvents such as but not limited to n-alkylenglycol, particulary diethylene glycol dimethyl ether (DME), or in the presence of dioxane or dioxane derivatives. In a preferred embodiment the denaturing solvents are used in concentrations between 1% and 35% (v/v). It is also preferred that the bisulfite reaction is carried out in the presence of scavengers such as but not limited to chromane derivatives, e.g., 6-hydroxy-2,5,7,8-tetramethylchromane 2-carboxylic acid (see: PCT/EP2004/011715 which is incorporated by reference in its entirety). The bisulfite conversion is preferably carried out at a reaction temperature between 30° C. and 70° C., whereby the temperature is increased to over 85° C. for short periods of times during the reaction (see: PCT/EP2004/011715 which is incorporated by reference in its entirety). The bisulfite treated DNA is preferably purified prior to further analysis. This may be conducted by any means known in the art, such as but not limited to ultrafiltration, preferably carried out by means of Microcon™ columns (manufactured by Millipore™). The purification is carried out according to a modified manufacturer's protocol (see: PCT/EP2004/011715 which is incorporated by reference in its entirety).

[0197] In the third step of the method, at least one target sequence of the treated DNA is amplified, using at least one pair of primer oligonucleotides according to the present invention, and an amplification enzyme. The amplification of several DNA segments can be carried out simultaneously in one and the same reaction vessel. Typically, the amplification is carried out using a polymerase chain reaction (PCR). The set of primer oligonucleotides includes at least two oligonucleotides whose sequences are reverse complementary, identical, or hybridize under stringent or highly stringent conditions to an at least 16-base-pair long segment of a base sequence selected from the group consisting of SEQ ID NO: 493 to SEQ ID NO: 964 and sequences complementary thereto. In alternative embodiments of the method the amplification may be carried out by means of methylation specific primers and/or in the presence of blocker oligonucleotides as will be discussed herein.

[0198] In a first alternate embodiment of the method, the methylation status of pre-selected CpG positions within the nucleic acid sequences comprising one or more of SEQ ID NO: 1 to SEQ ID NO: 118 may be determined by use of methylation-specific primer oligonucleotides. This technique (MSP) has been described in U.S. Pat. No. 6,265,171 to Herman. The use of methylation status specific primers for the amplification of bisulfite treated DNA allows the differentiation between methylated and unmethylated nucleic acids. MSP primers pairs contain at least one primer which hybridizes to a bisulfite treated CpG dinucleotide. Therefore, the sequence of said primers comprises at least one CpG dinucleotide. MSP primers specific for non-methylated DNA contain a “T” at the position of the C position in the CpG. Preferably, therefore, the base sequence of said primers is required to comprise a sequence having a length of at least 9 nucleotides which hybridizes to a treated nucleic acid sequence according to one of SEQ ID NO: 493 to SEQ ID NO: 964 and sequences complementary thereto, wherein the base sequence of said oligomers comprises at least one CpG dinucleotide.

[0199] A further preferred embodiment of the method comprises the use of blocker oligonucleotides. The use of such blocker oligonucleotides has been described by Yu et al., BioTechniques 23:714-720, 1997. Blocking probe oligonucleotides are hybridized to the bisulfite treated nucleic acid concurrently with the PCR primers. PCR amplification of the nucleic acid is terminated at the 5′ position of the blocking probe, such that amplification of a nucleic acid is suppressed where the complementary sequence to the blocking probe is present. The probes may be designed to hybridize to the bisulfite treated nucleic acid in a methylation status specific manner. For example, for detection of methylated nucleic acids within a population of umethylated nucleic acids, suppression of the amplification of nucleic acids which are unmethylated at the position in question would be carried out by the use of blocking probes comprising a ‘CpA’ or ‘TpA’ at the position in question, as opposed to a ‘CpG’ if the suppression of amplification of methylated nucleic acids is desired.

[0200] For PCR methods using blocker oligonucleotides, efficient disruption of polymerase-mediated amplification requires that blocker oligonucleotides not be elongated by the polymerase. Preferably, this is achieved through the use of blockers that are 3′-deoxyoligonucleotides, or oligonucleotides derivitized at the 3′ position with other than a “free” hydroxyl group. For example, 3′-O-acetyl oligonucleotides are representative of a preferred class of blocker molecule.

[0201] Additionally, polymerase-mediated decomposition of the blocker oligonucleotides should be precluded. Preferably, such preclusion comprises either use of a polymerase lacking 5′-3′ exonuclease activity, or use of modified blocker oligonucleotides having, for example, thioate bridges at the 5′-termini thereof that render the blocker molecule nuclease-resistant. Particular applications may not require such 5′ modifications of the blocker. For example, if the blocker- and primer-binding sites overlap, thereby precluding binding of the primer (e.g., with excess blocker), degradation of the blocker oligonucleotide will be substantially precluded. This is because the polymerase will not extend the primer toward, and through (in the 5′-3′ direction) the blocker—a process that normally results in degradation of the hybridized blocker oligonucleotide.

[0202] A particularly preferred blocker/PCR embodiment, for purposes of the present invention and as implemented herein, comprises the use of peptide nucleic acid (PNA) oligomers as blocking oligonucleotides. Such PNA blocker oligomers are ideally suited, because they are neither decomposed nor extended by the polymerase.

[0203] Preferably, therefore, the base sequence of said blocking oligonucleotides is required to comprise a sequence having a length of at least 9 nucleotides which hybridizes to a treated nucleic acid sequence according to one of SEQ ID NO: 493 to SEQ ID NO: 964 and sequences complementary thereto, wherein the base sequence of said oligonucleotides comprises at least one CpG, TpG or CpA dinucleotide.

[0204] The fragments obtained by means of the amplification can carry a directly or indirectly detectable label. Preferred are labels in the form of fluorescence labels, radionuclides, or detachable molecule fragments having a typical mass which can be detected in a mass spectrometer. Where said labels are mass labels, it is preferred that the labeled amplificates have a single positive or negative net charge, allowing for better detectability in the mass spectrometer. The detection may be carried out and visualized by means of, e.g., matrix assisted laser desorption/ionization mass spectrometry (MALDI) or using electron spray mass spectrometry (ESI).

[0205] Matrix Assisted Laser Desorption/Ionization Mass Spectrometry (MALDI-TOF) is a very efficient development for the analysis of biomolecules (Karas and Hillenkamp, Anal Chem., 60:2299-301, 1988). An analyte is embedded in a light-absorbing matrix. The matrix is evaporated by a short laser pulse thus transporting the analyte molecule into the vapor phase in an unfragmented manner. The analyte is ionized by collisions with matrix molecules. An applied voltage accelerates the ions into a field-free flight tube. Due to their different masses, the ions are accelerated at different rates. Smaller ions reach the detector sooner than bigger ones. MALDI-TOF spectrometry is well suited to the analysis of peptides and proteins. The analysis of nucleic acids is somewhat more difficult (Gut and Beck, Current Innovations and Future Trends, 1:147-57, 1995). The sensitivity with respect to nucleic acid analysis is approximately 100-times less than for peptides, and decreases disproportionally with increasing fragment size. Moreover, for nucleic acids having a multiply negatively charged backbone, the ionization process via the matrix is considerably less efficient. In MALDI-TOF spectrometry, the selection of the matrix plays an eminently important role. For desorption of peptides, several very efficient matrixes have been found which produce a very fine crystallization. There are now several responsive matrixes for DNA, however, the difference in sensitivity between peptides and nucleic acids has not been reduced. This difference in sensitivity can be reduced, however, by chemically modifying the DNA in such a manner that it becomes more similar to a peptide. For example, phosphorothioate nucleic acids, in which the usual phosphates of the backbone are substituted with thiophosphates, can be converted into a charge-neutral DNA using simple alkylation chemistry (Gut and Beck, Nucleic Acids Res. 23: 1367-73, 1995). The coupling of a charge tag to this modified DNA results in an increase in MALDI-TOF sensitivity to the same level as that found for peptides. A further advantage of charge tagging is the increased stability of the analysis against impurities, which makes the detection of unmodified substrates considerably more difficult.

[0206] In the fourth step of the method, the amplificates obtained during the third step of the method are analyzed in order to determine the methylation status of the CpG dinucleotides prior to the treatment.

[0207] In embodiments where the amplificates were obtained by means of MSP amplification, the presence or absence of an amplificate is in itself indicative of the methylation state of the CpG positions covered by the primer, according to the base sequences of said primer.

[0208] Similarly in embodiments where the amplificates were obtained by means of amplification in the presence of blocker oligonucleotides the presence or absence of an amplificate is in itself indicative of the methylation state of the CpG positions covered by the blocker, according to the base sequences of said blocker.

[0209] In embodiments where the amplificates were obtained by means of MSP amplification in the presence of blocker oligonucleotides the presence or absence of an amplificate is in itself indicative of the methylation state of the CpG positions covered by the primer and blocker oligonucleotides, according to the base sequences of said primer and blocker oligonucleotides.

[0210] Amplificates obtained by means of both standard and methylation specific PCR may be further analyzed by means of hybridization-based methods such as, but not limited to, array technology and probe based technologies as well as by means of techniques such as sequencing and template directed extension.

[0211] In one embodiment of the method, the amplificates synthesized in step three are subsequently hybridized to an array or a set of oligonucleotides and/or PNA probes. In this context, the hybridization takes place in the following manner: the set of probes used during the hybridization is preferably composed of at least 2 oligonucleotides or PNA-oligomers; in the process, the amplificates serve as probes which hybridize to oligonucleotides previously bonded to a solid phase; the non-hybridized fragments are subsequently removed; said oligonucleotides contain at least one base sequence having a length of at least 9 nucleotides which is reverse complementary or identical to a segment of the base sequences specified in the present Sequence Listing; and the segment comprises at least one CpG, TpG or CpA dinucleotide.

[0212] In a preferred embodiment, said dinucleotide is present in the central third of the oligomer. For example, wherein the oligomer comprises one CpG dinucleotide, said dinucleotide is preferably the fifth to ninth nucleotide from the 5′-end of a 13-mer. One oligonucleotide exists for the analysis of each CpG dinucleotide within a sequence selected from the group according to SEQ ID NO: 1 to SEQ ID NO: 118, and the equivalent positions within SEQ ID NO: 493 to SEQ ID NO: 964. Said oligonucleotides may also be present in the form of peptide nucleic acids. The non-hybridized amplificates are then removed. The hybridized amplificates are then detected. In this context, it is preferred that labels attached to the amplificates are identifiable at each position of the solid phase at which an oligonucleotide sequence is located.

[0213] In yet a further embodiment of the method, the genomic methylation status of the CpG positions may be ascertained by means of oligonucleotide probes that are hybridized to the bisulfite treated DNA concurrently with the PCR amplification primers (wherein said primers may either be methylation specific or standard).

[0214] A particularly preferred embodiment of this method is the use of fluorescence-based Real Time Quantitative PCR (Heid et al., Genome Res. 6:986-994, 1996; also see U.S. Pat. No. 6,331,393) employing a dual-labeled fluorescent oligonucleotide probe (TaqMan™ PCR, using an ABI Prism 7700 Sequence Detection System, Perkin Elmer Applied Biosystems, Foster City, Calif.). The TaqMan™ PCR reaction employs the use of a non-extendible interrogating oligonucleotide, called a TaqMan™ probe, which, in preferred embodiments, is designed to hybridize to a GpC-rich sequence located between the forward and reverse amplification primers. The TaqMan™ probe further comprises a fluorescent “reporter moiety” and a “quencher moiety” covalently bound to linker moieties (e.g., phosphoramidites) attached to the nucleotides of the TaqMan™ oligonucleotide. For analysis of methylation within nucleic acids subsequent to bisulfite treatment, it is required that the probe be methylation specific, as described in U.S. Pat. No. 6,331,393, (hereby incorporated by reference in its entirety) also known as the MethylLight™ assay. Variations on the TaqMan™ detection methodology that are also suitable for use with the described invention include the use of dual-probe technology (Lightcycler™) or fluorescent amplification primers (Sunrise™ technology). Both these techniques may be adapted in a manner suitable for use with bisulfite treated DNA, and moreover for methylation analysis within CpG dinucleotides.

[0215] A further suitable method for the use of probe oligonucleotides for the assessment of methylation by analysis of bisulfite treated nucleic acids In a further preferred embodiment of the method, the fifth step of the method comprises the use of template-directed oligonucleotide extension, such as MS-SNuPE as described by Gonzalgo and Jones, Nucleic Acids Res. 25:2529-2531, 1997.

[0216] In yet a further embodiment of the method, the fifth step of the method comprises sequencing and subsequent sequence analysis of the amplificate generated in the third step of the method (Sanger F., et al., Proc Natl Acad Sci USA 74:5463-5467, 1977).

[0217] In the most preferred embodiment of the method the genomic nucleic acids are isolated and treated according to the first three steps of the method outlined above, namely:

a) obtaining, from a subject, a biological sample having subject genomic DNA;
b) extracting or otherwise isolating the genomic DNA;
c) treating the genomic DNA of b), or a fragment thereof, with one or more reagents to convert cytosine bases that are unmethylated in the 5-position thereof to uracil or to another base that is detectably dissimilar to cytosine in terms of hybridization properties; and wherein
d) amplifying subsequent to treatment in c) is carried out in a methylation specific manner, namely by use of methylation specific primers and/or blocking oligonucleotides, and further, wherein
e) detecting of the amplificates is carried out by means of a real-time detection probe, as described above.

[0218] Preferably, where the subsequent amplification of d) is carried out by means of methylation specific primers, as described above, said methylation specific primers comprise a sequence having a length of at least 9 nucleotides which hybridizes to a treated nucleic acid sequence according to one of SEQ ID NO: 493 to SEQ ID NO: 964 and sequences complementary thereto, wherein the base sequence of said oligomers comprises at least one CpG dinucleotide.

[0219] In an alternative, and most preferred embodiment of the method, the subsequent amplification of d) is carried out in the presence of blocking oligonucleotides, as described above. Said blocking oligonucleotides comprising a sequence having a length of at least 9 nucleotides which hybridizes to a treated nucleic acid sequence according to one of SEQ ID NO: 493 to SEQ ID NO: 964 and sequences complementary thereto, wherein the base sequence of said oligomers comprises at least one CpG, TpG or CpA dinucleotide. Step e) of the method, namely the detection of the specific amplificates indicative of the methylation status of one or more CpG positions according to SEQ ID NO: 1 to SEQ ID NO: 118 is carried out by means of real-time detection methods as described above.

[0220] Additional embodiments of the invention provide a method for the analysis of the methylation status of genomic DNA according to the invention (SEQ ID NO: 1 to SEQ ID NO: 118, and complements thereof) without the need for pretreatment.

[0221] In the first step of such additional embodiments, the genomic DNA sample is isolated from tissue or cellular sources. Preferably, such sources include cell lines, histological slides, body fluids, or tissue embedded in paraffin. In the second step, the genomic DNA is extracted. Extraction may be by means that are standard to one skilled in the art, including but not limited to the use of detergent lysates, sonification and vortexing with glass beads. Once the nucleic acids have been extracted, the genomic double-stranded DNA is used in the analysis.

[0222] In a preferred embodiment, the DNA may be cleaved prior to the treatment, and this may be by any means standard in the state of the art, in particular with methylation-sensitive restriction endonucleases.

[0223] In the second step, the DNA is then digested with one or more methylation sensitive restriction enzymes. The digestion is carried out such that hydrolysis of the DNA at the restriction site is informative of the methylation status of a specific CpG dinucleotide.

[0224] In the third step, which is optional but a preferred embodiment, the restriction fragments are amplified. This is preferably carried out using a polymerase chain reaction, and said amplificates may carry suitable detectable labels as discussed above, namely fluorophore labels, radionuclides and mass labels.

[0225] In the fourth step the amplificates are detected. The detection may be by any means standard in the art, for example, but not limited to, gel electrophoresis analysis, hybridization analysis, incorporation of detectable tags within the PCR products, DNA array analysis, MALDI or ESI analysis.

[0226] Subsequent to the determination of the methylation state of the genomic nucleic acids the presence, absence or subclass of breast cell proliferative disorder is deduced based upon the methylation state of at least one CpG dinucleotide sequence of SEQ ID NO: 1 to SEQ ID NO: 118, or an average, or a value reflecting an average methylation state of a plurality of CpG dinucleotide sequences of SEQ ID NO: 1 to SEQ ID NO: 118. Methylation of CpG positions within any of the genes of Table 3, with the exception of PRDM2 and S100A7, is indicative of the presence of breast cell proliferative disorders. No methylation of CpG positions within the genes PRDM2 and S100A7 is indicative of the presence of breast cell proliferative disorders.

[0227] In alternative embodiments (e.g. Real-time analysis) of the method it is possible to quantify the level of methylation at the analyzed CpG positions (or an average thereof or a value reflecting an average thereof), in such embodiments it is preferred that a pre-determined cut-off point is determined above which measured methylation levels are determined as “methylated” and below which measured methylation levels are determined as “unmethylated”. Particularly preferred is a cut-off between 0% and 10% methylation or equivalent values, also preferred is a cut-off point between 3% and 7% methylation or equivalent values and further preferred is a cut-off point between 4% and 6% methylation or equivalent values.

[0228] Moreover, an additional aspect of the present invention is a kit comprising, for example: a bisulfite-containing reagent; a set of primer oligonucleotides containing at least two oligonucleotides whose sequences in each case correspond, are complementary, or hybridize under stringent or highly stringent conditions to a 16-base long segment of the sequences SEQ ID NO: 1 to SEQ ID NO: 964 (most preferably SEQ ID NO: 493 to SEQ ID NO: 964); oligonucleotides and/or PNA-oligomers; as well as instructions for carrying out and evaluating the described method. In a further preferred embodiment, said kit may further comprise standard reagents for performing a CpG position-specific methylation analysis, wherein said analysis comprises one or more of the following techniques: MS-SNuPE, MSP, MethyLight™, HeavyMethyl™, COBRA, and nucleic acid sequencing. However, a kit along the lines of the present invention can also contain only part of the aforementioned components.

[0229] In a further embodiment the present invention provides for molecular genetic markers selected from the group consisting APC, BCL11B, CASP8, CDKN2A, DAPK1, DDX51, DKK3, ESR1, ESR2, FABP3, SEQ ID NO: 4, SEQ ID NO: 7, SEQ ID NO: 9, SEQ ID NO: 14, SEQ ID NO: 16, SEQ ID NO: 17, SEQ ID NO: 19, SEQ ID NO: 28, SEQ ID NO: 29, SEQ ID NO: 36, SEQ ID NO: 46, SEQ ID NO: 48, SEQ ID NO: 51, SEQ ID NO: 117, GIRK2, GJB2, GS1, HS3ST2, MCT1, MGC34831, MLH1, NME1, ORPHAN NUCLEAR RECEPTOR NR5A2, PGR, PRDM6, RARA, RARB, S100A7, SASH1, SEQ ID NO:42, SERPINB5, SLC19A1, SNCG, SOD2, TERT, TGFBR2 and TP73 according to Table 26 that have novel utility for the analysis of methylation patterns associated with the development of cancer, in particular lung, breast and colon cancer. Said markers may be used for detecting cancer, in particular lung, breast and colon cancer and thereby providing improved means for the detection and early treatment of said disorders. As used herein the term cancer shall be understood as a generic term for all classes of malignant neoplasms characterized by uncontrolled cell proliferation and capable of invading other tissues by direct growth into adjacent tissue (invasion) and/or by migration of cells to distant sites (metastasis).

[0230] The use of said genes and/or sequences may be enabled by means of any analysis of the expression of the gene, by means of mRNA expression analysis or protein expression analysis. However, in the most preferred embodiment of the invention, the detection of breast cell proliferative disorders is enabled by means of analysis of the methylation status of said genes or genomic sequences and their promoter or regulatory elements. Methods for the methylation analysis of genes are described herein.

[0231] It is further preferred that the sequences of said genes in Table 26 according to SEQ ID NO: 65, 50, 71, 57, 98, 43, 24, 75, 91, 77, 4, 7, 9, 14, 16, 17, 19, 28, 29, 36, 46, 48, 51, 117, 27, 111, 40, 113, 101, 52, 89, 107, 11, 83, 20, 108, 88, 96, 102, 42, 68, 116, 73, 105, 92, 93 and 86 as described in the accompanying sequence listing are analyzed.

[0232] In a preferred embodiment the invention provides a method for detecting cancer in a subject. Said method comprises the following steps

i) contacting genomic DNA obtained from the subject with at least one reagent, or series of reagents that distinguishes between methylated and non-methylated CpG dinucleotides within at least one target region of the genomic DNA, wherein said contiguous nucleotides comprise at least one CpG dinucleotide sequence, and
ii) detecting, or detecting and distinguishing between or among breast cell proliferative disorders.

[0233] It is particularly preferred that said genomic DNA is obtained from isolated from body fluids of the subject.

[0234] Genomic DNA may be isolated by any means standard in the art, including the use of commercially available kits. Briefly, wherein the DNA of interest is encapsulated in by a cellular membrane the biological sample must be disrupted and lysed by enzymatic, chemical or mechanical means. The DNA solution may then be cleared of proteins and other contaminants e.g. by digestion with proteinase K. The genomic DNA is then recovered from the solution. This may be carried out by means of a variety of methods including salting out, organic extraction or binding of the DNA to a solid phase support. The choice of method will be affected by several factors including time, expense and required quantity of DNA. Body fluids are the preferred source of the DNA; particularly preferred are blood plasma, blood serum, whole blood, isolated blood cells and cells isolated from the blood.

[0235] The genomic DNA sample is then treated in such a manner that cytosine bases which are umethylated at the 5′-position are converted to uracil, thymine, or another base which is dissimilar to cytosine in terms of hybridization behavior. This will be understood as ‘treatment’ herein.

[0236] This is preferably achieved by means of treatment with a bisulfite reagent. The term “bisulfite reagent” refers to a reagent comprising bisulfite, disulfite, hydrogen sulfite or combinations thereof, useful as disclosed herein to distinguish between methylated and umethylated CpG dinucleotide sequences. Methods of said treatment are known in the art (e.g. PCT/EP2004/011715, which is incorporated by reference in its entirety). It is preferred that the bisulfite treatment is conducted in the presence of denaturing solvents such as but not limited to n-alkylenglycol, particularly diethylene glycol dimethyl ether (DME), or in the presence of dioxane or dioxane derivatives. In a preferred embodiment the denaturing solvents are used in concentrations between 1% and 35% (v/v). It is also preferred that the bisulfite reaction is carried out in the presence of scavengers such as but not limited to chromane derivatives, e.g., 6-hydroxy-2,5,7,8-tetramethylchromane 2-carboxylic acid (see: PCT/EP2004/011715 which is incorporated by reference in its entirety). The bisulfite conversion is preferably carried out at a reaction temperature between 30° C. and 70° C., whereby the temperature is increased to over 85° C. for short periods of times during the reaction (see: PCT/EP2004/011715 which is incorporated by reference in its entirety). The bisulfite treated DNA is preferably purified prior to further analysis. This may be conducted by any means known in the art, such as but not limited to ultrafiltration, preferably carried out by means of Microcon™ columns (manufactured by Millipore™). The purification is carried out according to a modified manufacturer's protocol (see: PCT/EP2004/011715 which is incorporated by reference in its entirety).

[0237] The treated DNA is then analyzed in order to determine the methylation state of one or more target gene sequences (prior to the treatment) associated with the development of cancer. It is particularly preferred that the target region comprises, or hybridizes under stringent conditions to at least 16 contiguous nucleotides of at least one gene or genomic sequence selected from the group consisting the genes and genomic sequences as listed in Table 26. It is further preferred that the sequences of said genes in Table 26 according to SEQ ID NO: 65, 621, 622, 857, 858, 50, 591, 592, 827, 828, 71, 633, 634, 869, 870, 57, 605, 606, 841, 842, 98, 687, 688, 923, 924, 43, 577, 578, 813, 814, 24, 539, 540, 775, 776, 75, 641, 642, 877, 878, 91, 673, 674, 909, 910, 77, 645, 646, 881, 882, 4, 499, 500, 735, 736, 7, 505, 506, 741, 742, 9, 509, 510, 745, 746, 14, 519, 520, 755, 756, 16, 523, 524, 759, 760, 17, 525, 526, 761, 762, 19, 529, 530, 765, 766, 28, 547, 548, 783, 784, 29, 549, 550, 785, 786, 36, 563, 564, 799, 800, 46, 583, 584, 819, 820, 48, 587, 588, 823, 824, 51, 593, 594, 829, 830, 117, 725, 726, 961, 962, 27, 545, 546, 781, 782, 111, 713, 714, 949, 950, 40, 571, 572, 807, 808, 113, 717, 718, 953, 954, 101, 693, 694, 929, 930, 52, 595, 596, 831, 832, 89, 669, 670, 905, 906, 107, 705, 706, 941, 942, 11, 513, 514, 749, 750, 83, 657, 658, 893, 894, 20, 531, 532, 767, 768, 108, 707, 708, 943, 944, 88, 667, 668, 903, 904, 96, 683, 684, 919, 920, 102, 695, 696, 931, 932, 42, 575, 576, 811, 812, 68, 627, 628, 863, 864, 116, 723, 724, 959, 960, 73, 637, 638, 873, 874, 105, 701, 702, 937, 938, 92, 675, 676, 911, 912, 93, 677, 678, 913, 914, 86, 663, 664, 899 and 900 as described in the accompanying sequence listing are analyzed. The method of analysis may be selected from those known in the art, including those listed herein. Particularly preferred are MethyLight™, MSP and the use of blocking oligonucleotides as previously described herein. It is further preferred that any oligonucleotides used in such analysis (including primers, blocking oligonucleotides and detection probes) should be reverse complementary, identical, or hybridize under stringent or highly stringent conditions to an at least 16-base-pair long segment of the base sequences of one or more of the converted sequences selected from the group consisting 65, 621, 622, 857, 858, 50, 591, 592, 827, 828, 71, 633, 634, 869, 870, 57, 605, 606, 841, 842, 98, 687, 688, 923, 924, 43, 577, 578, 813, 814, 24, 539, 540, 775, 776, 75, 641, 642, 877, 878, 91, 673, 674, 909, 910, 77, 645, 646, 881, 882, 4, 499, 500, 735, 736, 7, 505, 506, 741, 742, 9, 509, 510, 745, 746, 14, 519, 520, 755, 756, 16, 523, 524, 759, 760, 17, 525, 526, 761, 762, 19, 529, 530, 765, 766, 28, 547, 548, 783, 784, 29, 549, 550, 785, 786, 36, 563, 564, 799, 800, 46, 583, 584, 819, 820, 48, 587, 588, 823, 824, 51, 593, 594, 829, 830, 117, 725, 726, 961, 962, 27, 545, 546, 781, 782, 111, 713, 714, 949, 950, 40, 571, 572, 807, 808, 113, 717, 718, 953, 954, 101, 693, 694, 929, 930, 52, 595, 596, 831, 832, 89, 669, 670, 905, 906, 107, 705, 706, 941, 942, 11, 513, 514, 749, 750, 83, 657, 658, 893, 894, 20, 531, 532, 767, 768, 108, 707, 708, 943, 944, 88, 667, 668, 903, 904, 96, 683, 684, 919, 920, 102, 695, 696, 931, 932, 42, 575, 576, 811, 812, 68, 627, 628, 863, 864, 116, 723, 724, 959, 960, 73, 637, 638, 873, 874, 105, 701, 702, 937, 938, 92, 675, 676, 911, 912, 93, 677, 678, 913, 914, 86, 663, 664, 899 and 900 according to Table 26 and sequences complementary thereto.

[0238] It is particularly preferred that the CpG methylation analysis of the genes according to Table 26 are carried out in the form of a gene panel wherein said gene panel consists of one or more markers selected from Table 26 and one or more tissue specific methylation markers. The term tissue specific methylation marker shall be taken to mean a DNA sequence comprising at least one CpG position, the methylation status thereof being a unique characteristic of a specific tissue type thereby enabling the identification of biological matter of said tissue origin. It is further preferred that said gene panel consists of one or more markers selected from Table 26 and one or more tissue specific methylation markers selected from the group consisting of tissue specific markers for each of breast, colon and lung. In an alternative embodiment said gene panel consists of one or more markers selected from Table 26 and one or more tissue specific methylation markers selected from the group consisting of tissue specific markers for each of bladder, breast, colon, lung, rectal, pancreatic, endometrium, prostate, kidney and skin tissues.

[0239] It will be appreciated by one skilled in the art that the nucleic acid, oligonucleotides and kits as described herein for the detection and/or characterization will have an additional utility for the detection of all cancers, more preferably breast, lung and colon.

[0240] More specifically a preferred embodiment of the invention comprises the use of an oligonucleotide or oligomer for detecting the cytosine methylation state within genomic or treated (chemically modified) DNA, according to Table 26. Said oligonucleotide or oligomer comprising a nucleic acid sequence having a length of at least nine (9) nucleotides which hybridizes, under moderately stringent or stringent conditions (as defined herein above), to a treated nucleic acid sequence according to Table 26 and/or sequences complementary thereto, or to a genomic sequence according to Table 26 and/or sequences complementary thereto.

[0241] Furthermore, the present invention also provides kits for the detection of cancer comprising, for example: a bisulfite-containing reagent; a set of primer oligonucleotides containing at least two oligonucleotides whose sequences in each case correspond, are complementary, or hybridize under stringent or highly stringent conditions to a 16-base long segment of the sequences according to Table 26 (most preferably the converted sequences as shown in Table 26); oligonucleotides and/or PNA-oligomers; as well as instructions for carrying out and evaluating the described method. In a further preferred embodiment, said kit may further comprise standard reagents for performing a CpG position-specific methylation analysis, wherein said analysis comprises one or more of the following techniques: MS-SNuPE, MSP, MethyLight, HeavyMethyl, COBRA, and nucleic acid sequencing. However, a kit along the lines of the present invention can also contain only part of the aforementioned components.

[0242] While the present invention has been described with specificity in accordance with certain of its preferred embodiments, the following examples serve only to illustrate the invention and are not intended to limit the invention within the principles and scope of the broadest interpretations and equivalent configurations thereof.

### Example 1

### Microarray Analysis

### Microarray Analysis

[0243] To evaluate marker candidates a significant number of patient and control samples was analyzed using the applicant's proprietary methylation sensitive Microarray technology. For the Microarray study two gene panels were analyzed on a collection of 475 samples.

### Patient Samples

[0244] An overview of patient samples collected for the microarray study is provided in Table 25.

### Patient Samples: Breast Cancer

[0245] Early stage breast cancer samples were obtained from Erasmus Medical Centre, Rotterdam, The Netherlands. The tumor cell proportion was estimated to be on average 60%, ranging from 30% to 90%. Infiltrating ductal carcinomas (IDC) represented the largest histological subtype. Among the IDC patient samples, estrogen receptor (ER) positive and negative, pre- and post menopausal as well as aggressive (node positive) and less aggressive (node negative) tumors were included. In addition, infiltrating lobular carcinomas (ILC) and ductal carcinomas in-situ (DCIS) were analyzed. For all DCIS samples, the diagnosis was confirmed by pathology review and estimates of tumor cell content were provided. Finally, tumors with confirmed BRCA1 mutations were analyzed to assess whether genetic breast cancer samples, which represent about 5-10% of all breast cancer incidences, would show different DNA methylation patterns.

### Samples: Benign Breast Conditions

[0246] Normal breast samples were obtained primarily from breast reductions or from patient samples that were originally diagnosed with DCIS but were classified to be normal during a pathology review. To analyze DNA methylation patterns in breast epithelial cells, from which breast cancer is almost exclusively derived, epithelial cells were sorted using epithelial cell surface markers. In addition, samples with the diagnosis fibroadenoma, fibrocystic disease and atypical ductal hyperplasia were included into the group benign breast conditions.

### Samples: Other Cancers

[0247] To evaluate the marker performance on other cancer samples, tumor DNA from several other cancer types was analyzed. Emphasis was put on the most frequently occurring cancer classes in women (lung, colon) and tumors of the female reproductive system (endometrium, ovary).

### Lymphocytes

[0248] Age matched female lymphocyte samples were used to assess the methylation level of candidate markers in blood cells.

### Control Samples

[0249] For control purposes additional samples were included in both Microarray studies. In order to control the quality and the functionality of detection oligos, artificially up- and downmethylated DNA (Promega) was used. 8 male lymphocyte samples were included to allow for a positive control of the overall Microarray process by comparing differential methylation between male and female lymphocytes samples.

### Gene Selection

[0250] An initial selection of 63 candidate genes or sequences were identified. In addition, one gene fragment, ELK1, which was known to differentiate DNA of male from female origin, was included as a positive control. The gene panel for the second microarray study consisted of 59 sequences initially identified using AP-PCR, MCA or DMH and confirmed by sequencing and the ELK1 gene as a positive control. It has to be noted that not all sequences of the second panel currently map to known genes. Candidate markers from both chips are fully listed in Table 3.

### DNA Extraction

[0251] Samples were received from external collaborators or commercial providers either as frozen tissues, cell nuclei pellets, or extracted genomic DNA. DNA from tissue samples and cell nuclei pellets was isolated at using the QiaAmp Mini Kit (Qiagen, Hilden, Germany; No: 51306).

[0252] The DNA quality of all delivered and extracted samples was first assessed by photometrical measurements. Extinction at 260 nm and 280 nm was measured, A260/280 ratios were determined and the resulting DNA concentration were calculated.

[0253] After photometrical measurements each genomic DNA sample was analyzed by gel electrophoresis to assess the integrity of the DNA. Only minor signs of degradation were observed, indicating good overall quality of the extracted DNA.

### PCR Establishment and Multiplex PCR Optimization

[0254] To amplify all gene fragments, PCR assays were designed to match bisulfite treated DNA and to allow amplification independent of the methylation status of the respective fragment. A standardized primer design workflow optimized by the applicant for bisulfite treated DNA was employed. Individual PCR assays were considered established when successful amplification on bisulfite treated lymphocyte DNA was reproduced in triplicate and no background amplification of genomic DNA was detectable, ensuring bisulfite DNA specific amplification. Primers are listed in Table 1.

[0255] To allow efficient amplification, individual PCR assays were combined into multiplex PCR (MPCR) assays usually combining up to 8 primer pairs into one mPCR assay. Several multiplex PCR sets were calculated based on the primer sequences of the individual PCR amplificates and tested on lymphocyte DNA. Based on ALF express analyses the best performing combination of multiplex PCR sets were chosen.

### Bisulfite Treatment and Multiplex PCR

[0256] Total genomic DNA of all samples and controls was bisulfite treated converting unmethylated cytosines to uracil. Methylated cytosines are conserved. Bisulfite treatment was performed according to the applicant's optimized proprietary bisulfite treatment procedure. In order to avoid a potential process bias, the samples were randomized into processing batches. The patient samples were first grouped according to the major diagnosis classes:
[0257] ILC
[0258] IDC, N0, ER=neg
[0259] IDC, N0, ER=pos
[0260] IDC, N1 or N2, ER=neg
[0261] IDC, N1 or N2, ER=pos
[0262] Other Tumors:
[0263] benign disease/DCIS
[0264] lymphocytes:
[0265] normal breast and epithelial cells
[0266] BRCA1

[0267] Batches of 50 samples were created. Each batch contained the same proportion of samples from the major diagnosis classes. Two independent bisulfite reactions were performed for each DNA sample. 10 ng of bisulfite treated DNA was used for each multiplex PCR (mPCR) reaction. In order to monitor the MPCR results, two methods were used: ALF analysis and gel electrophoresis.

### Hybridization

[0268] All PCR products from each individual sample were then hybridized to glass slides carrying a pair of immobilized oligonucleotides for each CpG position under analysis. For hybridizations, the samples were grouped into processing batches in order to avoid a potential process-bias. The samples were processed in batches of 80 samples randomized for bisulfite batches. Each detection oligonucleotide was designed to hybridize to the bisulphite converted sequence around one CpG site which was either originally unmethylated (TG) or methylated (CG). See Table 2 for further details of all hybridization oligonucleotides used (both informative and non-informative.) Hybridization conditions were selected to allow the detection of the single nucleotide differences between the TG and CG variants.

[0269] Fluorescent signals from each hybridized oligonucleotide were detected using genepix scanner and software. Ratios for the two signals (from the CG oligonucleotide and the TG oligonucleotide used to analyze each CpG position) were calculated based on comparison of intensity of the fluorescent signals.

[0270] The samples were processed in batches of 80 samples randomized for sex, diagnosis, tissue, and bisulphite batch For each bisulfite treated DNA sample 2 hybridizations were performed. This means that for each sample a total number of 4 chips were processed.

### Data Analysis

[0271] For the analysis of chip data, Epigenomics' proprietary software (‘Episcape’) was used. EpiScape contains a data warehouse that supports queries to sample, genome and laboratory management databases, respectively. It encompasses a variety of statistical tools for analyzing and visualizing methylation array data. In the following sections we summarize the most important data analysis techniques that were applied for analyzing the data.

### From Raw Hybridization Intensities to Methylation Ratios

[0272] The log methylation ratio (log(CG/TG)) at each CpG position was determined according to a standardized preprocessing pipeline that includes the following steps:
[0273] For each spot the median background pixel intensity is subtracted from the median foreground pixel intensity. This gives a good estimate of background corrected hybridization intensities.
[0274] For both CG and TG detection oligonucleotides of each CpG position the background corrected median of the 4 redundant spot intensities is taken.
[0275] For each chip and each CG/TG oligo pair, the log(CG/TG) ratio is calculated.
[0276] For each sample the median of log(CG/TG) intensities over the redundant chip repetitions is taken.

[0277] This log ratio has the property that the hybridization noise has approximately constant variance over the full range of possible methylation rates (see e.g. Huber W, Von Heydebreck A, Sultmann H, Poustka A, Vingron M. 2002. Variance stabilization applied to Microarray data calibration and to the quantification of differential expression. Bioinformatics. 18 Suppl 1: S96-S104.)

### Principle Component Analysis

[0278] Principle component analysis (PCA) projects measurement vectors (e.g. chip data, methylation profiles on several CpG sites etc.) onto a new coordinate system. The new coordinate axes are referred to as principal components. The first principal component spans the direction of largest variance of the data. Subsequent components are ordered by decreasing variance and are orthogonal to each other. Different CpG positions contribute with different weights to the extension of the data cloud along different components. PCA is an unsupervised technique, i.e. it does not take into account any group or label information of the data points (for further details see e.g. Ripley, B. D. 1996. Pattern Recognition and Neural Networks, Cambridge, UK, Cambridge University Press).

[0279] PCA is typically used to project high dimensional data (in our case methylation-array data) onto lower dimensional subspaces in order to visualize or extract features with high variance from the data. In the present report we-used 2 dimensional projections for statistical quality control of the data. We investigated the effect of different process parameters on the chip data in order to rule out that changing process parameters caused large alterations in the measurement values.

[0280] A robust version of PCA was used to detect single outlier chips and exclude them from further analysis (Model F, Koenig T, Piepenbrock C, Adoijan P. 2002. Statistical process control for large scale Microarray experiments. Bioinformatics. 18 Suppl 1:S155-163).

### T² Control Charts

[0281] To control the general stability of the chip production process we use methods from the field of multivariate statistical process control (MVSPC). Our major tool is the T² control chart, which is used to detect significant deviations of the chip process from normal working conditions (Model F, Koenig T, Piepenbrock C, Adoijan P. 2002. Statistical process control for large scale Microarray experiments. Bioinformatics. 18 Suppl 1:S155-163).
[0282] Order the chip data with respect to a process parameter (e.g. hybridization data or spotting robot).
[0283] Define a historic data set, which describes the chip process under normal working conditions (e.g. the first 75 hybridized chips). In the chart, data from the historical data set are indicated by a special plot symbol.
[0284] Compute the distance of every new chip to the historic data set. If the distance of several consecutive chips exceeds a given control limit the process has to be regarded as out of control.

[0285] Use of T² charts to monitor the chip production process allows us to efficiently detect and eliminate most systematic error sources.

### Comparison of Groups: Univariate Methods

[0286] Wilcoxon rank sum tests are used to compare groups (e.g. male vs. female lymphocytes) in terms of measurement values of single CpG sites. A significant test result (p<0.05) indicates a shift between the distributions of the respective methylation log-ratios, i.e. log(CG/TG).

[0287] For the comparison of up- vs. down methylated chips hybridized with Promega DNA, Fisher scores are used to rank single CpG sites according to their discriminatory power. For each methylation ratio y=CG/TG, the Fisher score is calculated as

$$\frac{{( {\overline{y}}_{1} - {\overline{y}}_{2} )}^{2}}{{S}_{1}^{2} + {S}_{2}^{2}} ,$$

where y̅ᵢ and Sᵢ² denote mean and variance of group i, respectively.

### Comparison of Groups: Multivariate Methods

[0288] As referred to herein a marker (sometimes also simply referred to as gene or amplicon) is a genomic region of interest (also referred to herein using the abbreviation ROI). The ROI usually comprises several CpG positions. For testing the null hypothesis that a marker has no predictive power we use the likelihood ratio test for logistic regression models (see Venables, W. N. and Ripley, B. D. Modern Applied Statistics with S-PLUS, 3 rd Ed. edition. New York: Springer, 2002). The logistic regression model for a single marker is a linear combination of methylation measurements from all CpG positions in the respective ROI. The fitted logistic regression model is compared to a constant probability model that is independent of methylation and represents the null hypothesis. The p-value of the marker is computed via the likelihood ratio test.

[0289] A significant p-value for a marker means that the methylation of this ROI has some systematic correlation to the question of interest as given by the sample classes. In general a significant p-value does not necessarily imply a good classification performance. However, because with logistic regression we use a linear predictor as the basis of our test statistic small p-values will be indicative of a good clinical performance.

### Multiple Test Corrections

[0290] Performing a large number of tests at the 5% level will lead to a large number of false positive test results. If there are no differences between groups, the probability of rejecting at least one hypothesis of equality is nearly 1, if about 200 tests are performed. Correction for multiplicity is therefore necessary to reliably conclude that a test result is really significant. A conservative, but simple method is the Bonferroni correction which multiplies all p-values by the number of tests performed, where corrected values >1 are censored to 1.0.

[0291] Bonferroni corrections are used for all analyses. The correction helps to avoid spurious findings, however, it is a very conservative method and false negative results (“missed markers”) are a frequent consequence. Therefore, results corrected by the less conservative False Discovery Rate (FDR) methods are also given.

### Class Prediction by Supervised Learning

[0292] In order to give a reliable estimate of how well the CpG ensemble of a selected marker can differentiate between different tissue classes we can determine its prediction accuracy by classification. For that purpose we calculate a methylation profile-based prediction function using a certain set of tissue samples with a specific class label. This step is called training and it exploits the prior knowledge represented by the data labels. The prediction accuracy of that function is then tested on a set of independent samples. As a method of choice, we use the support vector machine (SVM) algorithm (see e.g. Cristiannini, N. and Shawe-Taylor, J. An introduction to support vector machines. Cambridge, UK: Cambridge University Press, 2000; Duda, R. O., Hart, P. E., and Stork, D. G. Pattern Classification. New York: John Wiley & Sons, 2001) to learn the prediction function. For this report, sensitivity and specificity are weighted equally. This is achieved by setting the risk associated with false positive and false negative classifications to be inversely proportional to the respective class sizes. Therefore sensitivity and specificity of the resulting classifier can be expected to be approximately equal. Note that this weighting can be adapted according to the clinical requirements.

### Estimating the Performance of the Tissue Class Prediction: Cross Validation

[0293] With limited sample size the cross-validation method provides an effective and reliable estimate for the prediction accuracy of a discriminator function, and therefore in addition to the significance of the markers we provide cross-validation accuracy, sensitivity and specificity estimates. For each classification task, the samples were partitioned into 5 groups of approximately equal size. Then the learning algorithm was trained on 4 of these 5 sample groups. The predictor obtained by this method was then tested on the remaining group of independent test samples. The number of correct positive and negative classifications was counted over 10 runs for the learning algorithm for all possible choices of the independent test group without using any knowledge obtained from the previous runs. This procedure was repeated on 10 random permutations of the sample set giving a better estimate of the prediction performance than if performed by simply splitting the samples into one training sample set and one independent test set.

### Results

[0294] The first step in the analysis of the array data was to identify discriminatory markers when comparing breast cancer samples with benign breast conditions. Since the preferred aim of the test is to detect early lesions differentiating between DCIS and benign breast conditions was the primary focus. In order to meet the requirements of a blood based screening test the performance of the marker candidate genes in differentiating breast cancer from lymphocytes and cancer from other origins, respectively was analyzed.

[0295] Finally, all breast cancer samples were compared against all other control samples and it was determined that a large number of markers met the specified statistical criteria.

[0296] For every comparison, two data analysis methods were used. Multivariate logistic regression analyses were performed and resulting p-values corrected for multiple testing according to the Bonferroni method. Separate models were fitted for each amplificate, comprising methylation ratios measured by 2-6 detection oligo pairs. A marker was preferred, if a p-value below 0.05 after Bonferroni correction for multiple testing was observed. In addition, linear support vector machine (SVM) algorithms were trained and accuracy, sensitivity and specificity to distinguish the respective classes were estimated based on cross validation.

[0297] In addition, co-methylation of CpG sites was assessed by analyzing individual detection oligos by means of univariate analyses. Co-methylation was assumed if at least two detection oligos of the same gene fragment differentiated the respective classes with statistical significance (p<0.05 after Bonferroni correction for multiple testing).

Breast Cancer vs. Benign Breast Conditions

### Microarray 1: See Table 12 for Results.

[0298] In this comparison the positive was 263 breast cancer samples consisting of 197 IDC, 24 ILC, 22 DCIS and 20 BRCA1 samples, respectively. The negative class consisted 28 normal breast samples and 46 breast samples with a benign breast condition, including fibroadenoma, fibrocystic disease and atypical ductal hyperplasia. Based on multivariate logistic regression analysis 49 markers differentiate between breast cancer and benign breast conditions with statistical significance. Of these, 28 markers fulfilled the co-methylation criterion with at least two detection oligos based on univariate analysis.

### Microarray 2: See Table 13 for Results.

[0299] In this comparison the positive class was 256 breast cancer samples which are consisting of 191 IDC, 22 ILC, 21 DCIS and 22 BRCA1 samples, respectively. The negative consisted 26 normal breast samples and 42 breast samples with a benign breast condition, including fibroadenoma, fibrocystic disease and atypical ductal hyperplasia. Based on multivariate logistic regression 48 markers differentiate between breast cancer and benign breast conditions with statistical significance. Of these, 32 markers fulfilled the co-methylation criterion with at least two detection oligos based on univariate an analysis.

[0300] Results are also presented in graphical form in FIGS. 19-30. Each of said figures presents a matrix of the level of methylation of each significant oligomer, oligomers belonging to each gene or genomic sequence are grouped in one discrete block. The SEQ ID NO: of each oligomer is shown on the left hand side of the matrix, on the right hand side of the matrix the FDR corrected multivariate P-value of the oligomers belonging to each individual gene or genomic sequence is shown. The level of methylation is shown by the color of each square of the matrix, from black representing total methylation (+2) to white representing total unmethylation (−2) as shown on the scale to the right hand side of the matrix. Each vertical line of the matrix represents one sample, the type of sample is shown above the matrix.

DCIS vs. Benign Breast Conditions

### Microarray 1: See Table 10 for Results.

[0301] In this comparison the positive class was 263 breast cancer samples consisting of 197 IDC, 24 ILC, 22 DCIS and 20 BRCA1 samples, respectively. The negative class is composed of 28 normal breast samples and 46 breast samples with a benign breast condition, including fibroadenoma, fibrocystic disease and atypical ductal hyperplasia. Based on multivariate logistic regression analysis 31 markers differentiate between breast cancer and benign breast conditions with statistical significance. Of these, 13 markers fulfilled the co-methylation criterion with at least two detection oligos statistically significant based on univariate analysis.

### Microarray 2: See Table 11 for Results.

[0302] In this comparison the positive class was 256 breast cancer samples consisting 191 IDC, 22 ILC, 21 DCIS and 22 BRCA1 samples, respectively. The negative class i consisted of 26 normal breast samples and 42 breast samples with a benign breast condition, including fibroadenoma, fibrocystic disease and atypical ductal hyperplasia. Based on multivariate logistic regression 35 markers differentiate between breast cancer and benign breast conditions with statistical significance. Of these, 17 markers fulfilled the co-methylation criterion with at least two detection oligos statistically significant based on univariate analysis.

[0303] Results are also presented in graphical form in FIGS. 31-42. Each of said figures presents a matrix of the level of methylation of each significant oligomer, oligomers belonging to each gene or genomic sequence are grouped in one discrete block. The SEQ ID NO: of each oligomer is shown on the left hand side of the matrix, on the right hand side of the matrix the FDR corrected multivariate P-value of the oligomers belonging to each individual gene or genomic sequence is shown. The level of methylation is shown by the colour of each square of the matrix, from black representing total methylation (+2) to white representing total umethylation (−2) as shown on the scale to the right hand side of the matrix. Each vertical line of the matrix represents one sample, the type of sample is shown above the matrix.

Breast Cancer vs. Lymphocytes

### Microarray 1: See Table 8 for Results.

[0304] In this comparison the positive class was 263 breast cancer samples which consisted 197 IDC, 24 ILC, 22 DCIS and 20 BRCA1 samples, respectively. The negative class consisted of 28 lymphocyte samples. Based on multivariate logistic regression analysis 49 markers differentiate between breast cancer and benign breast conditions with statistical significance. Of these, 30 markers fulfilled the co-methylation criterion with at least two detection oligos statistically significant based on univariate analysis.

### Microarray 2: See Table 9 for Results.

[0305] In this comparison the positive class was 256 breast cancer samples which consisted of 191 IDC, 22 ILC, 21 DCIS and 22 BRCA1 samples, respectively. The negative class consisted of 34 lymphocyte samples. Based on multivariate logistic regression, 47 markers differentiate between breast cancer and benign breast conditions with statistical significance. Of these, 37 markers fulfilled the co-methylation criterion with at least two detection oligos statistically significant based on univariate analysis.

[0306] Results are also presented in graphical form in FIGS. 43-54. Each of said figures presents a matrix of the level of methylation of each significant oligomer, oligomers belonging to each gene or genomic sequence are grouped in one discrete block. The SEQ ID NO: of each oligomer is shown on the left hand side of the matrix, on the right hand side of the matrix the FDR corrected multivariate P-value of the oligomers belonging to each individual gene or genomic sequence is shown. The level of methylation is shown by the colour of each square of the matrix, from black representing total methylation (+2) to white representing total unmethylation (−2) as shown on the scale to the right hand side of the matrix. Each vertical line of the matrix represents one sample, the type of sample is shown above the matrix.

Breast Cancer vs. Other Cancers

### Microarray 1: See Table 6 for Results.

[0307] In this comparison the positive class was 263 breast cancer samples which consisted of 197 IDC, 24 ILC, 22 DCIS and 20 BRCA1 samples, respectively. The negative class consisted of 71 other cancer samples which is composed of 12 colon samples, 19 lung samples, 16 ovary samples and 28 further samples of smaller tissue groups. Based on multivariate logistic regression analysis 28 markers differentiate between breast cancer and benign breast conditions with statistical significance. Of these, 16 markers fulfilled the co-methylation criterion with at least two detection oligos statistically significant based on univariate analysis.

### Microarray 2: See Table 7 for Results.

[0308] In this comparison the positive class was 256 breast cancer samples which consisted of 191 IDC, 22 ILC, 21 DCIS and 22 BRCA1 samples, respectively. The negative class consisted of 73 other cancer samples which consisted of 18 colon samples, 18 lung samples, 16 ovary samples and 21 further samples of smaller tissue groups. Based on multivariate logistic regression 25 markers differentiate between breast cancer and benign breast conditions with statistical significance. Of these, 15 markers fulfilled the co-methylation criterion with at least two detection oligos statistically significant based on univariate analysis.

[0309] Results are also presented in graphical form in FIGS. 55-66. Each of said figures presents a matrix of the level of methylation of each significant oligomer, oligomers belonging to each gene or genomic sequence are grouped in one discrete block. The SEQ ID NO: of each oligomer is shown on the left hand side of the matrix, on the right hand side of the matrix the FDR corrected multivariate P-value of the oligomers belonging to each individual gene or genomic sequence is shown. The level of methylation is shown by the colour of each square of the matrix, from black representing total methylation (+2) to white representing total unmethylation (−2) as shown on the scale to the right hand side of the matrix. Each vertical line of the matrix represents one sample, the type of sample is shown above the matrix.

Breast Cancer vs. All Other Controls

### Microarray 1: See Table 4 for Results.

[0310] In this comparison the positive class was 263 breast cancer samples which consisted of 197 IDC, 24 ILC, 22 DCIS and 20 BRCA1 samples, respectively. The negative class consisted of 74 breast samples (normal and benign disease), 71 other cancer samples and 28 lymphocyte samples. Based on multivariate logistic regression analysis 50 markers differentiate between breast cancer and benign breast conditions with statistical significance. Of these, 29 markers fulfilled the co-methylation criterion with at least two detection oligos statistically significant based on univariate analysis.

### Microarray 2: See Table 5 for Results.

[0311] In this comparison the positive class was 256 breast cancer samples which consisted of 191 IDC, 22 ILC, 21 DCIS and 22 BRCA1 samples, respectively. The negative class consisted of 68 breast samples (normal and benign disease), 73 other cancer samples and 34 lymphocyte samples. Based on multivariate logistic regression 48 markers differentiate between breast cancer and benign breast conditions with statistical significance. Of these, 32 markers fulfilled the co-methylation criterion with at least two detection oligos statistically significant based on univariate analysis.

[0312] Results are also presented in graphical form in FIGS. 67-78. Each of said figures presents a matrix of the level of methylation of each significant oligomer, oligomers belonging to each gene or genomic sequence are grouped in one discrete block. The SEQ ID NO: of each oligomer is shown on the left hand side of the matrix, on the right hand side of the matrix the FDR corrected multivariate P-value of the oligomers belonging to each individual gene or genomic sequence is shown. The level of methylation is shown by the color of each square of the matrix, from black representing total methylation (+2) to white representing total unmethylation (−2) as shown on the scale to the right hand side of the matrix. Each vertical line of the matrix represents one sample, the type of sample is shown above the matrix.

### Selection of General Cancer Markers

[0313] Markers from both microarrays which were significant in differentiating Breast cancer vs. benign breast conditions but were not significant in differentiating Breast cancer vs. other cancers as listed in Table 27 were determined to have utility as general cancer markers.

### Example 2

### Real-Time Assay Analysis of Breast Cancer Markers

[0314] In the following example a variety of Real-Time assays were developed for the methylation analysis of:

### SEQ ID NO: 104 (CCND2)

### SEQ ID NO: 77 (FABP3)

### SEQ ID NO: 90 (RASSF1A)

### SEQ ID NO: 13 (MSF)

### SEQ ID NO: 15

### SEQ ID NO: 20 (PRDM6)

### SEQ ID NO: 38 (LMX1A)

### SEQ ID NO: 3

### SEQ ID NO:4

### SEQ ID NO: 29

### SEQ ID NO: 22 (NR2E1)

### SEQ ID NO: 115 (SCGB3A1)

### SEQ ID NO: 112 (SLIT2)

### SEQ ID NO: 6

### SEQ ID NO: 98 (DAPK1)

[0315] The assays were designed to be run on the LightCycler platform (Roche Diagnostics), but other such instruments commonly used in the art are also suitable. The assays were MSP and HeavyMethyl assays for the analysis of bisulfite treated DNA.

[0316] The MSP assay comprises one pair of methylation specific primers suitable for the amplification of a bisulfite converted target sequence, each primer comprising at least one CpG position. Accordingly, only target DNA which was methylated at the relevant CpG positions (prior to bisulfite treatment) is amplified. The amplificate is then detected by means of a Taqman style fluorescent labelled detection probes.

[0317] In the HeavyMethyl assay the target DNA is amplified by means of a pair of primers that are specific for amplification of a bisulfite converted target sequence, wherein said primers do not hybridise to positions that comprised CpG dinucleotides prior to bisulfite treatment. Amplification is carried out in the presence of a blocker oligonucleotide that comprises at least one ApC dinucleotide and that hybridises to bisulfite converted non-methylated CpG positions situated between the two primers. The blocker oligonucleotides are suitably modified to suppress amplification of target sequences by the primers. Accordingly, only target DNA which was methylated at the relevant CpG positions (prior to bisulfite treatment) is amplified. Amplificates are detected by means of Lightcycler style fluorescent labelled dual detection probes.

[0318] Primer, probe and where relevant blocker oligonucleotides according to Table 22 were used. The following reagents and reaction temperatures were used:

### SEQ ID NO: 104 (CCND2) (Assay 4)

### Lightcycler Thermal Cycling Program:

Initial denaturation at 95° C. for 10 min
55 cycles:

| | |
|---|---|
| Denaturation at 95° C. for | 15 sec |
| Annealing at 62° C. for | 45 sec |

### Reagents:

| Reagent | Concentration |
|---|---|
| 1a + 1b reagent mix | 1.00x |
| Taqman probe | 0.30 μM |
| Primer mix | 0.60 pmol/μl (each) |
| MgCl2 | 3.50 mM |

### SEQ ID NO: 77 (FABP3) (Assay 1-5

### Lightcycler Thermal Cycling Program:

Initial denaturation at 95° C. for 10 min
55 cycles:

| | |
|---|---|
| Denaturation at 95° C. for | 15 sec |
| Annealing at 62° C. for | 45 sec |

### Reagents:

| Reagent | Concentration |
|---|---|
| 1a + 1b reagent mix | 1.00x |
| Taqman probe | 0.30 μM |
| Primer mix | 0.60 pmol/μl (each) |
| MgCl2 | 3.50 mM |

### SEQ ID NO: 90 (RASSF1A) (Assay 1

### Lightcycler Thermal Cycling Program:

Initial denaturation at 95° C. for 10 min
55 cycles:

| | |
|---|---|
| Initial denaturation at 95° C. for | 15 sec |
| Annealing at 62° C. for | 45 sec |

### Reagents:

| Reagent | Concentration |
|---|---|
| 1a + 1b reagent mix | 1.00x |
| Taqman probe | 0.30 μM |
| Primer mix | 0.60 pmol/μl (each) |
| MgCl2 | 3.50 mM |

### SEQ ID NO: 13 (MSF) (Assay 2)

### Lightcycler Thermal Cycling Program:

Initial denaturation at 95° C. for 10 min
55 cycles:

| | |
|---|---|
| Initial denaturation at 95° C. for | 15 sec |
| Annealing at 62° C. for | 45 sec |

[0326] Reagents:

| Reagent | Concentration |
|---|---|
| 1a + 1b reagent mix | 1.00x |
| Taqman probe | 0.30 μM |
| Primer mix | 0.60 pmol/μl (each) |
| MgCl2 | 3.50 mM |

### SEQ ID NO: 15 (Assay 5)

### Lightcycler Thermal Cycling Program:

| | | |
|---|---|---|
| Activation: | 95° C. | 10 min |
| 55 cycles: | 95° C. | 10 sec |
| | 56° C. | 30 sec |
| | 72° C. | 10 sec |
| melting curve: | 95° C. | 10 sec |
| | 40° C. | 10 sec |
| | 70° C. | 0 sec |
| cooling: | 40° C. | 5 sec |

### Reagents:

| Reagent | Concentration |
|---|---|
| MgCl2 | 3.50 mM |
| Primer mix | 0.30 μM (each) |
| Blocker | 4.00 μM |
| Detection probes | 0.15 μM (each) |
| 1a + 1b reagent FastStart mix | 1.00 |

### SEQ ID NO: 20 (PRDM6) (Assay 100)

### Lightcycler Thermal Cycling Program:

Initial denaturation at 95° C. for 10 min
55 cycles:

| | |
|---|---|
| Initial denaturation at 95° C. for | 15 sec |
| Annealing at 62° C. for | 45 sec |

### Reagents:

| Reagent | Concentration |
|---|---|
| 1a + 1b reagent mix | 1.00x |
| Taqman probe | 0.30 μM |
| Primer mix | 0.60 pmol/μl (each) |
| MgCl2 | 3.50 mM |

### SEQ ID NO: 38 (LMX1A) (Assay 3)

### Lightcycler Thermal Cycling Program:

Initial denaturation at 95° C. for 10 min
55 cycles:

| | |
|---|---|
| Initial denaturation at 95° C. for | 15 sec |
| Annealing at 62° C. for | 45 sec |

### Reagents:

| Reagent | Concentration |
|---|---|
| 1a + 1b reagent mix | 1.00x |
| Taqman probe | 0.30 μM |
| Primer mix | 0.60 pmol/μl (each) |
| MgCl2 | 3.50 mM |

### SEQ ID NO: 3 (Assay 8)

### Lightcycler Thermal Cycling Program:

Initial denaturation at 95° C. for 10 min
55 cycles:

| | |
|---|---|
| Denaturation at 95° C. for | 15 sec |
| Annealing at 62° C. for | 45 sec |

### Reagents:

| Reagent | Concentration |
|---|---|
| 1a + 1b reagent mix | 1.00x |
| Taqman probe | 0.30 μM |
| Primer mix | 0.60 pmol/μl (each) |
| MgCl2 | 3.50 mM |

### SEQ ID NO: 29 (Assay 2)

### Lightcycler Thermal Cycling Program:

Initial denaturation at 95° C. for 10 min
55 cycles:

| | |
|---|---|
| Denaturation at 95° C. for | 15 sec |
| Annealing at 62° C. for | 45 sec |

### Reagents:

| Reagent | Concentration |
|---|---|
| 1a + 1b reagent mix | 1.00x |
| Taqman probe | 0.30 μM |
| Primer mix | 0.60 pmol/μl (each) |
| MgCl2 | 3.50 mM |

### SEQ ID NO: 22 (NR2E1) (Assay o)

### Lightcycler Thermal Cycling Program:

Initial denaturation at 95° C. for 10 min
55 cycles:

| | |
|---|---|
| Denaturation at 95° C. for | 15 sec |
| Annealing at 62° C. for | 45 sec |

### Reagents:

| Reagent | Concentration |
|---|---|
| 1a + 1b reagent mix | 1.00x |
| Taqman probe | 0.30 μM |
| Primer mix | 0.60 pmol/μl (each) |
| MgCl2 | 3.50 mM |

### SEQ ID NO: 115 (SCGB3A1) (Assay 1)

### Lightcycler Thermal Cycling Program:

Initial denaturation at 95° C. for 10 min
55 cycles:

| | |
|---|---|
| Denaturation at 95° C. for | 15 sec |
| Annealing at 62° C. for | 45 sec |

### Reagents:

| Reagent | Concentration |
|---|---|
| 1a + 1b reagent mix | 1.00x |
| Taqman probe | 0.30 μM |
| Primer mix | 0.60 pmol/μl (each) |
| MgCl2 | 3.50 mM |

### SEQ ID NO: 112 (SLIT2) (Assay 2-2)

### Lightcycler Thermal Cycling Program:

Initial denaturation at 95° C. for 10 min
55 cycles:

| | |
|---|---|
| Denaturation at 95° C. for | 15 sec |
| Annealing at 62° C. for | 45 sec |

### Reagents:

| Reagent | Concentration |
|---|---|
| 1a + 1b reagent mix | 1.00x |
| Taqman probe | 0.30 μM |
| Primer mix | 0.60 pmol/μl (each) |
| MgCl2 | 3.50 mM |

### SEQ ID NO: 6 (Assay 5)

### Lightcycler Thermal Cycling Program:

| | |
|---|---|
| Activation: | 95° C. 10 min |
| 55 cycles: | 95° C. 10 sec |
| | 56° C. 30 sec |
| | 72° C. 10 sec |
| melting curve: | 95° C. 10 sec |
| | 40° C. 10 sec |
| | 70° C. 0 sec |
| cooling: | 40° C. 5 sec |

### Reagents:

| Reagent | Concentration |
|---|---|
| MgCl2 | 3.50 mM |
| Primer mix | 0.30 μM (each) |
| Blocker | 4.00 μM |
| Detection probes | 0.15 μM (each) |
| 1a + 1b reagent FastStart mix | 1.00 |

### SEQ ID NO: 98 (DAPK1) (Assay 2)

### Lightcycler Thermal Cycling Program:

Initial denaturation at 95° C. for 10 min
55 cycles:

| | |
|---|---|
| Denaturation at 95° C. for | 15 sec |
| Annealing at 62° C. for | 45 sec |

### Reagents:

| Reagent | Concentration |
|---|---|
| 1a + 1b reagent mix | 1.00x |
| Taqman probe | 0.30 μM |
| Primer mix | 0.60 pmol/μl (each) |
| MgCl2 | 3.50 mM |

### SEQ ID NO: 22 (NR2E1) (Assay 2)

### Lightcycler Thermal Cycling Program:

| | |
|---|---|
| Activation: | 95° C. 10 min |
| 55 cycles: | 95° C. 10 sec |
| | 56° C. 30 sec |
| | 72° C. 10 sec |
| melting curve: | 95° C. 10 sec |
| | 40° C. 10 sec |
| | 70° C. 0 sec |
| cooling: | 40° C. 5 sec |

### Reagents:

| Reagent | Concentration |
|---|---|
| MgCl2 | 3.50 mM |
| Primer mix | 0.30 μM (each) |
| Blocker | 4.00 μM |
| Detection probes | 0.15 μM (each) |
| 1a + 1b reagent FastStart mix | 1.00 |

### Samples

[0349] The assays were tested in two different settings. In a first setting the following breast cancer markers as confirmed according to the above microarray experiment were analysed in both blood and breast cancer samples in order to determine their utility as diagnostic markers suitable for use in a blood based screening test.

### SEQ ID NO: 104 (CCND2)

### SEQ ID NO: 77 (FABP3)

### SEQ ID NO:90 RASSF1A)

### SEQ ID NO: 13 (MSF)

### SEQ ID NO: 15

### SEQ ID NO: 20 (PRDM6)

### SEQ ID NO: 38 (LMX1A)

### SEQ ID NO:3

### SEQ ID NO:29

### SEQ ID NO: 22 (NR2E1)

### SEQ ID NO: 115 (SCGB3A1)

### SEQ ID NO: 112 (SLIT2)

### SEQ ID NO: 6

### SEQ ID NO: 98 (DAPK1)

[0350] Ten whole blood samples and 14 breast cancer samples were analysed. In a second setting the following breast cancer markers as confirmed according to the above microarray experiment were analysed in order to determine whether they were general cancer markers (i.e. would need to be combined with more cancer type specific markers in a blood based screening test) or if they were specifically methylated in breast cancer only (as opposed to other cancers):

### SEQ ID NO: 104 (CCND2)

### SEQ ID NO: 77 (FABP3)

### SEQ ID NO: 90 (RASSF1A)

### SEQ ID NO: 13 (MSF)

### SEQ ID NO: 20 (PRDM6)

### SEQ ID NO: 38 (LMX1A)

[0351] All sample were analysed in twenty four breast cancer samples and a “other cancers” sample group consisting of 12 lung cancer and 12 colon cancer samples, with the exception of 17378 wherein data is only presented with respect to a “other cancers” group consisting of the 12 lung cancer samples.

### Results

[0352] Quantification of the amount of methylated DNA measured by each assay was calculated by comparison of the amplification curve of a test sample to a standard curve. The standard curve was generated according to a dilution series used as a reference.

[0353] FIGS. 1 to 12 show the binary distribution plot (left hand side of the figure) of the proportion (Y-axis) of blood and breast cancer samples with a measured methylation level above a specified cut-off point (X-axis). On the right hand side of each figure is a ROC plot of sensitivity against specificity. The ROC curve is, a plot of the true positive rate against the false positive rate for the different possible cutpoints of a diagnostic test. It shows the trade-off between sensitivity and specificity depending on the selected cutpoint (any increase in sensitivity will be accompanied by a decrease in specificity). The area under an ROC curve (AUC) is a measure for the accuracy of a diagnostic test (the larger the area the better, optimum is 1, a random test would have a ROC curve lying on the diagonal with an area of 0.5; for reference: J. P. Egan. Signal Detection Theory and ROC Analysis, Academic Press, New York, 1975). Each detected blood sample was considered a false positive and each undetected breast cancer was considered a false negative.

[0354] FIGS. 13 to 18 show the binary distribution plots (top left hand side of the figure) of the proportion of blood vs. other cancer samples (Y-axis) with a measured methylation level above a specified cut-off point (X-axis). The bottom left hand side plot show the binary distribution plots (top left hand side of the figure) of the proportion (Y-axis) of each type of cancer sample with a measured methylation level above a specified cut-off point (X-axis).

[0355] On the right hand side of each figure is a ROC plot of sensitivity against specificity. The ROC curve is a plot of the true positive rate against the false positive rate for the different possible cutpoints of a diagnostic test. It shows the trade-off between sensitivity and specificity depending on the selected cutpoint (any increase in sensitivity will be accompanied by a decrease in specificity). The area under an ROC curve (AUC) is a measure for the accuracy of a diagnostic test (the larger the area the better, optimum is 1, a random test would have a ROC curve lying on the diagonal with an area of 0.5; for reference: J. P. Egan. Signal Detection Theory and ROC Analysis, Academic Press, New York, 1975).

[0356] Each detected other cancer sample was considered a false positive and each undetected breast cancer was considered a false negative.

[0357] Refer to Tables 23 and 24 to determine which figure correspond to which assay.

[0358] Table 23 shows the AUC and particularly preferred sensitivity and specificities of each assayed gene according to the blood vs. breast cancer comparison.

[0359] Table 24 shows the AUC and particularly preferred sensitivity and specificities of each assayed gene according to the other cancer vs. breast cancer comparison.

TABLE 1
Primer according to Example 1.

| | | Amplificate |
|---|---|---|
| No: | Primer: | Length: |
| 1. MSF (SEQ ID NO: | AATAAACAACCCTCCCCTC (SEQ ID NO: 973) | 423 |
| 13) | TGGAGATTATTGTGTGAGTTTT (SEQ ID NO: 972) | |
| 2. SEQ ID NO: 14 (SEQ | CCAAAAACCTCTACATTCAAAC (SEQ ID NO: 975) | 358 |
| ID NO: 14) | AAAAAGGGGATTAGTGGGT (SEQ ID NO: 974) | |
| 3. SEQ ID NO: 15 (SEQ | ATTTTAGGTGTAAGTTTAAGGTTGT (SEQ ID NO: 976) | 473 |
| ID NO: 15) | ATCTACCTTTCCCCACCC (SEQ ID NO: 977) | |
| 4. SEQ ID NO: 16 (SEQ | ACACAACTAAAACCCTCAAATC (SEQ ID NO: 979) | 262 |
| ID NO: 16) | AGGGAAAGGAGGTAGAGGT (SEQ ID NO: 978) | |
| 5. SEQ ID NO: 17 (SEQ | ATCACACCCTCCCAAAAC (SEQ ID NO: 981) | 385 |
| ID NO: 17) | AGTAGGAATTGTTTATAGATATGTTGA (SEQ ID NO: 980) | |
| 6. SEQ ID NO: 18 (SEQ | ACTCCCCAAAATCCCACT (SEQ ID NO: 983) | 488 |
| ID NO: 18) | TGTTTTAGGTTTGATGGATTAGA (SEQ ID NO: 982) | |
| 7. SEQ ID NO: 19 (SEQ | AAAACCCCATCTCTACAACC (SEQ ID NO: 985) | 498 |
| ID NO: 19) | AATGAGAGGGAAAATGAAAGT (SEQ ID NO: 984) | |
| 8. PRDM6 (SEQ ID | ACTTCCAATCTTAAAAACCAAA (SEQ ID NO: 987) | 272 |
| NO: 20) | GGAGGAGAGGATGAAGTTTTA (SEQ ID NO: 986) | |
| 9. RAP2B (SEQ ID | CTCAACCTACAAACAAATCTTAAC (SEQ ID NO: 989) | 176 |
| NO: 21) | AGGGGTAGGGGAGTGTTT (SEQ ID NO: 988) | |
| 10. NR2E1 (SEQ ID | CACCCCTACAACCCAAAC (SEQ ID NO: 991) | 495 |
| NO: 22) | GGTGGAGGGAAGATTAGTGTA (SEQ ID NO: 990) | |
| 11. NR2E1 (SEQ ID | CCTTAAAAACCTCCAACCC (SEQ ID NO: 993) | 343 |
| NO: 22) | GGTTGTTGAAAGAAGTTAGTTTG (SEQ ID NO: 992) | |
| 12. PCDH7 (SEQ ID | TCAATTCAAAAACACAACCAA (SEQ ID NO: 995) | 448 |
| NO: 23) | AATTTTAGAGAGTTGGAGAAAGAT (SEQ ID NO: 994) | |
| 13. DKK3 (SEQ ID | TAGGTATAGTAGGGTGGTTTTAAGT (SEQ ID NO: 996) | 338 |
| NO: 24) | AAAACTCCAACATCACAAATAA (SEQ ID NO: 997) | |
| 14. RTTN (SEQ ID | TTCAAAAACAAACCACTAATACC (SEQ ID NO: 999) | 438 |
| NO: 25) | GTGATTTTAGAGAGGTTGGAAG (SEQ ID NO: 998) | |
| 15. BCL11B (SEQ ID | CCCCAAACTATAACCAACTTTA (SEQ ID NO: 1001) | 381 |
| NO: 50) | TATGGGATTGGAAGGGAT (SEQ ID NO: 1000) | |
| 16. COL5A1 (SEQ ID | GATTAGTAGGAGGGGTTGTTTA (SEQ ID NO: 1002) | 500 |
| NO: 53) | AAATCCCACATCTACATATCATC (SEQ ID NO: 1003) | |
| 17. SEQ ID NO: 51 | GTAGGGGTGGAGTGAAGG (SEQ ID NO: 1004) | 404 |
| (SEQ ID NO: 51) | CACTCAAAACTCCCAAATAAAA (SEQ ID NO: 1005) | |
| 18. MGC34831 (SEQ | AATGAGAGTAGGGTTTGAAATTAG (SEQ ID NO: 1006) | 273 |
| ID NO: 52) | TATCCAAAAACTTCACCTCAAC (SEQ ID NO: 1007) | |
| 19. SEQ ID NO: 54 | TGGGATGAAGAAGTAGTGTGTT (SEQ ID NO: 1008) | 398 |
| (SEQ ID NO: 54) | CTCCAACTAAACATTAAATAAATCTCA (SEQ ID NO: 1009) | |
| 20. PDLIM1 (SEQ ID | GGTTTATTTGTTGGGTGGTTA (SEQ ID NO: 1010) | 440 |
| NO: 55) | CTATCAAAACCTACTTCCCTCTC (SEQ ID NO: 1011) | |
| 21. KOX7 (SEQ ID | ACCACCACAAATATCCCAA (SEQ ID NO: 1013) | 423 |
| NO: 49) | GAGGTTAAGGGATGGTTTTATT (SEQ ID NO: 1012) | |
| 22. SEQ ID NO: 3 (SEQ | TCCTCAACTCTACAAACCTAAAA (SEQ ID NO: 1015) | 408 |
| ID NO: 3) | GTAGGGGAGGGAAGTAGATGT (SEQ ID NO: 1014) | |
| 23. SEQ ID NO: 4 (SEQ | TGTTTGGGTTAGATGGGG (SEQ ID NO: 1016) | 378 |
| ID NO: 4) | ATTCTCAACCACCAAAATCTAC (SEQ ID NO: 1017) | |
| 24. SEQ ID NO: 1 (SEQ | CCTCTAATTCCTATCAATCACC (SEQ ID NO: 1019) | 435 |
| ID NO: 1) | TTAGAAGTGAAAGTAGAAGGGTTT (SEQ ID NO: 1018) | |
| 25. SEQ ID NO: 9 (SEQ | GAAAGGAGAGGTTAAAGGTTG (SEQ ID NO: 1020) | 696 |
| ID NO: 9) | AACTCACTTAACTCCAATCCC (SEQ ID NO: 1021) | |
| 26. SEQ ID NO: 5 (SEQ | TTCTATTAAAACCCAACTCCTC (SEQ ID NO: 1023) | 395 |
| ID NO: 5) | ATAAGGGGAATTGTTGTAGGTT (SEQ ID NO: 1022) | |
| 27. SEQ ID NO: 6 (SEQ | AGGGAGTTAAGTAAGGGGTTAG (SEQ ID NO: 1024) | 442 |
| ID NO: 6) | AACACCAACAAAATATCCATCT (SEQ ID NO: 1025) | |
| 28. SEQ ID NO: 8 (SEQ | TAGTAGTTTGAAGAAGGGGAAG (SEQ ID NO: 1026) | 373 |
| ID NO: 8) | AAACATTCCTAAAATCACAAAAA (SEQ ID NO: 1027) | |
| 29. SEQ ID NO: 6 (SEQ | AGATGGATATTTTGTTGGTGTT (SEQ ID NO: 1028) | 250 |
| ID NO: 6) | TACACAATTATACCTTTCAAACAAT (SEQ ID NO: 1029) | |
| 30. SEQ ID NO: 7 (SEQ | CAAACCCAATTCTCAATATCC (SEQ ID NO: 1031) | 434 |
| ID NO: 7) | GAAGTTGTTGTATATGAGGTTGTTA (SEQ ID NO: 1030) | |
| 31. | GAAGAGGAATGGGAAAATTAG (SEQ ID NO: 1032) | 500 |
| PROSTAGLANDIN | TCACCAACAAAATACCCAA (SEQ ID NO: 1033) | |
| E2 RECEPTOR, EP4 | | |
| SUBTYPE | | |
| (PROSTANOID EP4 | | |
| RECEPTOR) (PGE | | |
| RECEPTOR, EP4 | | |
| SUBTYPE) (SEQ ID | | |
| NO: 10) | | |
| 32. | AACCATCAACCATACCTATTTC (SEQ ID NO: 1035) | 467 |
| PROSTAGLANDIN | TGAGTAAGATGATTATTTGGATTT (SEQ ID NO: 1034) | |
| E2 RECEPTOR, EP4 | | |
| SUBTYPE | | |
| (PROSTANOID EP4 | | |
| RECEPTOR) (PGE | | |
| RECEPTOR, EP4 | | |
| SUBTYPE) (SEQ ID | | |
| NO: 10) | | |
| 33. ORPHAN | CCACTCACTCAACCCATAA (SEQ ID NO: 1037) | 398 |
| NUCLEAR | GTGTGAGGTTTGGGTATTTTT (SEQ ID NO: 1036) | |
| RECEPTOR NR5A2 | | |
| (ALPHA-1- | | |
| FETOPROTEIN | | |
| TRANSCRIPTION | | |
| FACTOR) | | |
| (HEPATOCYTIC | | |
| TRANSCRIPTION | | |
| FACTOR) (B1- | | |
| BINDING FACTOR) | | |
| (HB1F) (CYP7A | | |
| PROMOTER | | |
| BINDING FACTOR) | | |
| (SEQ ID NO: 11) | | |
| 34. LIM DOMAIN | AAACCCTACTTCCTACAAACAA (SEQ ID NO: 1039) | 420 |
| KINASE 1 (EC | AGGGAGGTTTGGTGTATTTT (SEQ ID NO: 1038) | |
| 2.7.1.37) (LIMK-1) | | |
| (SEQ ID NO: 12) | | |
| 36. HOXB13 (SEQ ID | CTCACACTCTTTAACCTTTTCC (SEQ ID NO: 1041) | 496 |
| NO: 34) | GAGAGGGATATGAGGGTTTTT (SEQ ID NO: 1040) | |
| 37. SEQ ID NO: 35 | TAAATCCCCCAACACATACTAC (SEQ ID NO: 1043) | 473 |
| | GTTTATTGGTTTTTATAGATTAAGG (SEQ ID NO: 1042) | |
| 38. SEQ ID NO: 36 | AGGGGTGAGTTTTATTAGAGGT (SEQ ID NO: 1044) | 479 |
| | CTAAACCCCAATCTCTCCA (SEQ ID NO: 1045) | |
| 39. MGC10561 (SEQ | AAAACCATAAAATCCCACATAA (SEQ ID NO: 1047) | 486 |
| ID NO: 37) | TTTTTGGGAGGGAAGAGT (SEQ ID NO: 1046) | |
| 40. LMX1A (SEQ ID | AACAACACTCTTACCCTTATCC (SEQ ID NO: 1049) | 490 |
| NO: 38) | TGAATGTGGAGGATGAGATAGT (SEQ ID NO: 1048) | |
| 41. SENP3 (SEQ ID | GGTTAAGGAAGGTAGGAGATTT (SEQ ID NO: 1050) | 466 |
| NO: 39) | CTTCCAAACTAAAAACCACTTT (SEQ ID NO: 1051) | |
| 42. GS1 (SEQ ID NO: | ATCACCATTCAAAATACAAATATC (SEQ ID NO: 1053) | 470 |
| 40) | GTTTTGGAGATTAGTTGGGG (SEQ ID NO: 1052) | |
| 43. TITF1 (SEQ ID | CTTACTCCCTCAATACAAAACC (SEQ ID NO: 1055) | 467 |
| NO: 41) | GAGAGAAAGAAGTTGGGTGAT (SEQ ID NO: 1054) | |
| 44. SEQ ID NO: 42 | GAGAAAAAGAGGGAGATTATTG (SEQ ID NO: 1056) | 336 |
| (SEQ ID NO: 42) | CCACATTCAAAAACACAAATAC (SEQ ID NO: 1057) | |
| 45. DDX51 (SEQ ID | CAAACTCACTCTATAACCTCCC (SEQ ID NO: 1059) | 482 |
| NO: 43) | TTTAGGGGTTTGGATTTTG (SEQ ID NO: 1058) | |
| 46. SEQ ID NO: 117 | GGTTAGGGTGGGTAAAGGTAG (SEQ ID NO: 1060) | 288 |
| | CCTTTCCTTCAAATAACAAAAC (SEQ ID NO: 1061) | |
| 47. Q8NAN2 (SEQ ID | TTGTATAGGAAAGTAGGAGGGTT (SEQ ID NO: 1062) | 307 |
| NO: 44) | AAACAAAATAATCTTTCACATCC (SEQ ID NO: 1063) | |
| 48. SEQ ID NO: 45 | CAAAACAAATTAACTCCCCC (SEQ ID NO: 1065) | 461 |
| (SEQ ID NO: 45) | AGGGTGATAGTATAAAGGAAATTG (SEQ ID NO: 1064) | |
| 49. SEQ ID NO: 46 | TCCTCTACCCTTCACCTACC (SEQ ID NO: 1067) | 383 |
| (SEQ ID NO: 46) | TGGAAGATAATGTGTTATTTAGTATTT (SEQ ID NO: 1066) | |
| 50. O60279 (SEQ ID | TTAAAAGGGAATGGATATAGAGTT (SEQ ID NO: 1068) | 485 |
| NO: 47) | ACTTTCCTAAAATCTCCAAAAA (SEQ ID NO: 1069) | |
| 51. SEQ ID NO: 48 | TATTTTTGGGGATGAAGAAAAT (SEQ ID NO: 1070) | 484 |
| (SEQ ID NO: 48) | ACAAAATCTCCTTTCATTTAACA (SEQ ID NO: 1071) | |
| 52. SEQ ID NO: 2 (SEQ | TCCAATAAACACAAACCTAAATC (SEQ ID NO: 1212) | 471 |
| ID NO: 2) | ATATGGGATTGATGGAAGATAG (SEQ ID NO: 1213) | |
| 53. SNAP25 (SEQ ID | ACTCCACCACAATTACAACCTA (SEQ ID NO: 1075) | 352 |
| NO: 33) | AGAAAGAGGGGGTTTTATTATT (SEQ ID NO: 1074) | |
| 54. SEQ ID NO: 26 | CTTTACCCATCAACAACCCTA (SEQ ID NO: 1077) | 257 |
| (SEQ ID NO: 26) | GGAGGTGTGATTTTATTGTTTG (SEQ ID NO: 1076) | |
| 55. GIRK2 (SEQ ID | ACCTTCCACAAAAACAATAAAC (SEQ ID NO: 1079) | 457 |
| NO: 27) | TTTTAAGAGAGGAGATTATGATTGA (SEQ ID NO: 1078) | |
| 56. SEQ ID NO: 28 | GTTGAGAGGTAAGGTATGAAGG (SEQ ID NO: 1080) | 477 |
| (SEQ ID NO: 28) | TTAATTCCCCTCTTTAACCTAATAA (SEQ ID NO: 1081) | |
| 57. SEQ ID NO: 28 | TACAAAAATAAACTCAAAATCCCTA (SEQ ID NO: 1083) | 477 |
| (SEQ ID NO: 28) | TTTTTAAGGGAAAGTGGAGG (SEQ ID NO: 1082) | |
| 58. SEQ ID NO: 29 | GAGAGAAATGGGTGATGAAGT (SEQ ID NO: 1084) | 493 |
| (SEQ ID NO: 29) | CCCAACAAATAAAACCCC (SEQ ID NO: 1085) | |
| 59. ARL7 (SEQ ID | TTGAATGTAAGGAGAGGTGG (SEQ ID NO: 1086) | 385 |
| NO: 30) | AAATCTCTACACCCAAATACAAA (SEQ ID NO: 1087) | |
| 60. SEQ ID NO: 31 | CTCAACAAATAAACTTCACAAAA (SEQ ID NO: 1089) | 435 |
| (SEQ ID NO: 31) | TTTTTGGAGATAGTAGGAAGGG (SEQ ID NO: 1088) | |
| 61. THH (SEQ ID NO: | GTTTTAGGAAAGGGAGAGGG (SEQ ID NO: 1090) | 475 |
| 32) | TTAATTCACTCCCACCAATAAA (SEQ ID NO: 1091) | |
| 62. APC (SEQ ID NO: | TCAACTACCATCAACTTCCTTA (SEQ ID NO: 1092) | 491 |
| 65) | AATTTATTTTTAGTGTTGTAGTGGG (SEQ ID NO: 1093) | |
| 63. ESR1 (SEQ ID NO: | AACTATACTCTTTTTCCAAATAACC (SEQ ID NO: 1095) | 197 |
| 75) | TTTTAGGGGGATTTTGAGTT (SEQ ID NO: 1094) | |
| 64. MLH1 (SEQ ID | TTTTAGGAGTGAAGGAGGTTA (SEQ ID NO: 1096) | 442 |
| NO: 89) | ATATCCAACCAATAAAAACAAA (SEQ ID NO: 1097) | |
| 65. TIMP3 (SEQ ID | TTTGTTTTAGGAGAGGGGTAG (SEQ ID NO: 1098) | 487 |
| NO: 103) | CTTAAATCCACCCAAACTTAAC (SEQ ID NO: 1099) | |
| 66. CDKN1A (SEQ ID | AGTTAGAAAGGGGGTTTATTTT (SEQ ID NO: 1100) | 452 |
| NO: 67) | TCTCTCACCTCCTCTAAATACC (SEQ ID NO: 1101) | |
| 67. TP53 (SEQ ID NO: | AATAATTTCCACCAATTCTACC (SEQ ID NO: 1103) | 251 |
| 80) | TTAGTTTTGAGTATATGGGAGGG (SEQ ID NO: 1102) | |
| 68. GSTP1 (SEQ ID | ATTTGGGAAAGAGGGAAAG (SEQ ID NO: 1104) | 301 |
| NO: 59) | TAAAAACTCTAAACCCCATCC (SEQ ID NO: 1105) | |
| 69. PGR (SEQ ID NO: | ATGATTGAGTTGAAGGTAAAGG (SEQ ID NO: 1106) | 347 |
| 83) | TCCAAAACACTATCCAACAAT (SEQ ID NO: 1107) | |
| 70. RARB (SEQ ID | GGGAGTTTTTAAGTTTTGTGAG (SEQ ID NO: 1108) | 415 |
| NO: 88) | AATCATTTACCATTTTCCAAAC (SEQ ID NO: 1109) | |
| 71. CASP8 (SEQ ID | ACCCCCTTCCCTACTAAAC (SEQ ID NO: 1110) | 436 |
| NO: 71) | TTAGGGTTAAATGAAAAAGAAAA (SEQ ID NO: 1111) | |
| 72. SNCG (SEQ ID | ACCCTTTAACCACCACACTAT (SEQ ID NO: 1112) | 444 |
| NO: 73) | TTGGGTTGAGTTAGTAGGAGTT (SEQ ID NO: 1113) | |
| 73. TGFBR2 (SEQ ID | GGATGGTTAGAGAGTTGAAATG (SEQ ID NO: 1114) | 374 |
| NO: 93) | AAAATCCTACACTTCCTACAACA (SEQ ID NO: 1115) | |
| 74. THBS1 (SEQ ID | CCCCCTTCACTTTCTAACTAA (SEQ ID NO: 1117) | 497 |
| NO: 81) | AGAGGATGGTTTTGGAGTTT (SEQ ID NO: 1116) | |
| 75. CDH1 (SEQ ID | CCCTTTCTAATCCCAAATCT (SEQ ID NO: 1119) | 421 |
| NO: 79) | GTTTTAAGGGTTTATGGTTGG (SEQ ID NO: 1118) | |
| 76. DAPK1 (SEQ ID | GGTGGGTATGTGTGTAGAGAA (SEQ ID NO: 1120) | 407 |
| NO: 98) | AAACCCAAAACACTTCAACTC (SEQ ID NO: 1121) | |
| 77. TP73 (SEQ ID NO: | AGAGGGGATAGTAGGAGGA (SEQ ID NO: 1122) | 322 |
| 86) | ACTACAAATAAAAAACCCAAAAC (SEQ ID NO: 1123) | |
| 78. SFN (SEQ ID NO: | TTTTTGATGAGGTGGTTGTT (SEQ ID NO: 1124) | 489 |
| 69) | AAACAAATCTTAAACCCTAATCC (SEQ ID NO: 1125) | |
| 79. HIC1 (SEQ ID NO: | TTTTTAAAAGGGGGTTTTAGGT (SEQ ID NO: 1126) | 589 |
| 85) | TACCCTTCCAAAAACTAAAAAAAAC (SEQ ID NO: 1127) | |
| 80. RASSF1A (SEQ ID | AGTGGGTAGGTTAAGTGTGTTG (SEQ ID NO: 1128) | 319 |
| NO: 90) | CCCCAAAATCCAAACTAAA (SEQ ID NO: 1129) | |
| 81. BRCA1 (SEQ ID | TTGGAAGAGTAGAGGTTAGAGG (SEQ ID NO: 1130) | 425 |
| NO: 66) | TACCCCAAAACATCACTTAAAC (SEQ ID NO: 1131) | |
| 82. APAF1 (SEQ ID | TTGGGGTGTGTTTATTTGTAT (SEQ ID NO: 1132) | 451 |
| NO: 82) | CTCCCCTAAATCTCTACAACC (SEQ ID NO: 1133) | |
| 83. TMS1/ASC (SEQ | GGATTAAGGGTGTAGTAAGGAA (SEQ ID NO: 1134) | 364 |
| ID NO: 84) | TCTCCAAATAAAAACTAACCAAC (SEQ ID NO: 1135) | |
| 84. HOXA5 (SEQ ID | AATCCTACCTAATAACCTCTAAAAAT (SEQ ID NO: 1137) | 361 |
| NO: 78) | GGGGAAATAAAGTTGTTGTAAA (SEQ ID NO: 1136) | |
| 85. SASH1 (SEQ ID | TTTTGTAGTGGGTTTAATTGTTTT (SEQ ID NO: 1138) | 500 |
| NO: 102) | ATAACTTACCAAAATACCCATCA (SEQ ID NO: 1139) | |
| 86. BRCA2 (SEQ ID | ACCCACCCAAACCTAACT (SEQ ID NO: 1141) | 388 |
| NO: 56) | GGTTGGTAGAGATAAAAGGGTA (SEQ ID NO: 1140) | |
| 87. NME1 (SEQ ID | CACCCAAACTAAAATACCCTAA (SEQ ID NO: 1143) | 306 |
| NO: 107) | GGAAAAAGTTGATAAATTGGAA (SEQ ID NO: 1142) | |
| 88. TPM1 (SEQ ID | GGGAAAGGGTAGGTAGAAAATA (SEQ ID NO: 1144) | 386 |
| NO: 110) | ACACCCAACCATTAAAATCC (SEQ ID NO: 1145) | |
| 89. SOD2 (SEQ ID | CCTATCCTAAAATAAATCCCAA (SEQ ID NO: 1147) | 441 |
| NO: 105) | GGAGAAAGGAGGTTGTAGGTT (SEQ ID NO: 1146) | |
| 90. THRB (SEQ ID | GGGTATTGGTAATTTGGTTAGA (SEQ ID NO: 1148) | 452 |
| NO: 106) | CACACAACTTCCTCATCATAAA (SEQ ID NO: 1149) | |
| 91. TWIST (SEQ ID | GTGGGGATGAAATGGTTATAG (SEQ ID NO: 1150) | 354 |
| NO: 100) | AACCCCTTAAAATTCCAAAA (SEQ ID NO: 1151) | |
| 92. IL6 (SEQ ID NO: | CAAAAACAAACTCCCAACTATAC (SEQ ID NO: 1153) | 485 |
| 99) | AAGGTGGGTATGGATTTTAGA (SEQ ID NO: 1152) | |
| 93. RARA (SEQ ID | CATATACATTTCCATCCTTCCT (SEQ ID NO: 1155) | 305 |
| NO: 108) | ATAAATATAGGTAGAGGGGGTTTT (SEQ ID NO: 1154) | |
| 94. CDH13 (SEQ ID | GGAAAAGTGGAATTAGTTGGTA (SEQ ID NO: 1156) | 407 |
| NO: 70) | TCTTCCCTACCTAAAACAAAAA (SEQ ID NO: 1157) | |
| 95. CLDN7 (SEQ ID | TCCTTTCTTCCCAACAAATA (SEQ ID NO: 1159) | 345 |
| NO: 87) | TTGAGTGTAAAGGGTTTAGGTT (SEQ ID NO: 1158) | |
| 96. ESR2 (SEQ ID NO: | AGTTGGAGAAATTGAAAAGATTA (SEQ ID NO: 1160) | 441 |
| 91) | TAACAAACCCAAAACCTCTCTA (SEQ ID NO: 1161) | |
| 97. IGFBP7 (SEQ ID | CCTCTCTCTACATCCCCAAA (SEQ ID NO: 1163) | 414 |
| NO: 94) | GGGAGAAGGTTATTATTTAGGTT (SEQ ID NO: 1162) | |
| 98. FHIT (SEQ ID NO: | GGGAGGTAAGTTTAAGTGGAAT (SEQ ID NO: 1164) | 302 |
| 76) | ACTACACCCCCAAAACCA (SEQ ID NO: 1165) | |
| 99. SERPINB5 (SEQ | TTTTTGTTTAATGGGTAGTTATTTT (SEQ ID NO: 1166) | 353 |
| ID NO: 68) | CTCCTCTCCTACTCAAACCTC (SEQ ID NO: 1167) | |
| 100. LOT1 (SEQ ID | AGAGGAAAGAGAGTAGTTGGTG (SEQ ID NO: 1168) | 479 |
| NO: 95) | TATAAAATTCTCCCAACCAAAA (SEQ ID NO: 1169) | |
| 101. PLAU (SEQ ID | GTGATATTTGGGGATTGTTATT (SEQ ID NO: 1170) | 479 |
| NO: 62) | ACTCCCTCCCCTATCTTACA (SEQ ID NO: 1171) | |
| 102. PRSS8 (SEQ ID | GGTTTGTAGTTTTGAAAGGATT (SEQ ID NO: 1172) | 481 |
| NO: 72) | AATACATTATCCCCACCCTAC (SEQ ID NO: 1173) | |
| 103. S100A7 (SEQ ID | TATCCTACCCCCATAACTATCA (SEQ ID NO: 1175) | 243 |
| NO: 96) | AGTTTGAGATTTGGTTTATTTTG (SEQ ID NO: 1174) | |
| 104. SLC19A1 (SEQ | TAGGGGAAAGTGATTTTGA (SEQ ID NO: 1176) | 459 |
| ID NO: 116) | TTTTCCTTTTAACACCCTAAAAC (SEQ ID NO: 1177) | |
| 105. SYK (SEQ ID | GTGGGTTTTGGGTAGTTATAGA (SEQ ID NO: 1178) | 485 |
| NO: 60) | TAACCTCCTCTCCTTACCAA (SEQ ID NO: 1179) | |
| 106. TERT (SEQ ID | TAGGTTTTGGATGTTAGGGATT (SEQ ID NO: 1180) | 483 |
| NO: 92) | ACCACCTCCTCACCTAAACT (SEQ ID NO: 1181) | |
| 107. GJB2 (SEQ ID | ATTTTGAGGGGAGAAAGAAG (SEQ ID NO: 1182) | 450 |
| NO: 111) | CCCATAAATTCCCCAAATAC (SEQ ID NO: 1183) | |
| 108. FABP3 (SEQ ID | TAGGAAAGGGAGAAGGTTTTAT (SEQ ID NO: 1184) | 488 |
| NO: 77) | CTATTCCCCAATCTTAACCAA (SEQ ID NO: 1185) | |
| 109. GPC3 (SEQ ID | TCAAATCTAACAAACCACAAAA (SEQ ID NO: 1187) | 489 |
| NO: 118) | AATTATTGTAGAGGGGTTGTAGG (SEQ ID NO: 1186) | |
| 110. ARH1/NOEY2 | TGGTAGAAGAGTAGTATTAGTGGTTT (SEQ ID NO: 1188) | 279 |
| (SEQ ID NO: 97) | CCAATCCCTTTTCCAAATA (SEQ ID NO: 1189) | |
| 111. SLIT2 (SEQ ID | AAATTACCCAAACATCCTTCA (SEQ ID NO: 1191) | 309 |
| NO: 112) | AGGTATAAGATAGAAGAGGGGATTT (SEQ ID NO: 1190) | |
| 112. HS3ST2 (SEQ ID | CAAAAACTTCTCCAAAAATCC (SEQ ID NO: 1193) | 171 |
| NO: 113) | TATAATGAGGGTTTGGGGTAAT (SEQ ID NO: 1192) | |
| 113. STAT1 (SEQ ID | TGTTTTGGTAGTGAAGAGGATT (SEQ ID NO: 1194) | 372 |
| NO: 109) | AACATTAAACCCTTCCATCTTT (SEQ ID NO: 1195) | |
| 114. PRDM2 (SEQ ID | CCAACTCATCTCCAACCTATAC (SEQ ID NO: 1197) | 438 |
| NO: 114) | AGAATTAAAAAGATTGAAGGAGG (SEQ ID NO: 1196) | |
| 115. MCT1 (SEQ ID | CTCTATCACTTCTTCCCTCTCA (SEQ ID NO: 1199) | 430 |
| NO: 101) | AATTTTAGGGAGTTAGGATGGTA (SEQ ID NO: 1198) | |
| 116. IGSF4 (SEQ ID | TAATCCCCAACTTCCTTAAAAA (SEQ ID NO: 1201) | 489 |
| NO: 74) | GGAGTGGAGAGTAAGAAGGTAG (SEQ ID NO: 1200) | |
| 117. SCGB3A1 (SEQ | TTTAGTGTTTAATGTTTGGGGT (SEQ ID NO: 1202) | 395 |
| ID NO: 115) | CAATTCCTAACTCCCTAATCC (SEQ ID NO: 1203) | |
| 118. AR (SEQ ID NO: | AATATAGGGAGGTTTAGGGTTT (SEQ ID NO: 1204) | 424 |
| 61) | TAACCATACATTTCTCATCCAA (SEQ ID NO: 1205) | |
| 119. EYA4 (SEQ ID | GGAAGAGGTGATTAAATGGAT (SEQ ID NO: 1206) | 226 |
| NO: 58) | CCCAAAAATCAAACAACAA (SEQ ID NO: 1207) | |
| 120. LEF1 (SEQ ID | ATAGAATGGTTAGGGGGTATTT (SEQ ID NO: 1209) | 484 |
| NO: 63) | TACAAATATCAACCTCTCTCCC (SEQ ID NO: 1208) | |
| 121. ALX4 (SEQ ID | CTCCTCCTTCCAACAAAAA (SEQ ID NO: 1210) | 487 |
| NO: 64) | GTTTAGAGGTTTTGGGATGATT (SEQ ID NO: 1211) | |
| 122. SEQ ID NO: 2 | TCCAATAAACACAAACCTAAATC (SEQ ID NO: 1212) | 471 |
| (SEQ ID NO: 2) | ATATGGGATTGATGGAAGATAG (SEQ ID NO: 1213) | |
| 123. CCND2 (SEQ ID | GGAGGAAGGAGGTGAAGA (SEQ ID NO: 1214) | 378 |
| NO: 104) | CCCCTACATCTACTAACAAACC (SEQ ID NO: 1215) | |
| 124. CDKN2A (SEQ | GGGGTTGGTTGGTTATTAGA (SEQ ID NO: 1216) | 256 |
| ID NO: 57) | AACCCTCTACCCACCTAAAT (SEQ ID NO: 1217) | |

TABLE 2
Detection oligonucleotides according to Example 2.

| | | |
|---|---|---|
| No: | Gene | Oligo: |

| | | |
|---|---|---|
| 1 | SEQ ID NO: 5 (SEQ ID NO: 5) | AATGAGCGAGAAAGTA (SEQ ID NO: 1970) |
| 2 | SEQ ID NO: 5 (SEQ ID NO: 5) | AGAATGAGTGAGAAAGT (SEQ ID NO: 1971) |
| 3 | SEQ ID NO: 5 (SEQ ID NO: 5) | ATTAAACGGGATGGTT (SEQ ID NO: 1972) |
| 4 | SEQ ID NO: 5 (SEQ ID NO: 5) | AATATTAAATGGGATGGT (SEQ ID NO: 1973) |
| 5 | SEQ ID NO: 5 (SEQ ID NO: 5) | GAGTTGCGAGGATTTT (SEQ ID NO: 1974) |
| 6 | SEQ ID NO: 5 (SEQ ID NO: 5) | GGAGTTGTGAGGATTT (SEQ ID NO: 1975) |
| 7 | SEQ ID NO: 5 (SEQ ID NO: 5) | TATGAGGTCGTATTGG (SEQ ID NO: 2196) |
| 8 | SEQ ID NO: 5 (SEQ ID NO: 5) | TATGAGGTTGTATTGGT (SEQ ID NO: 2197) |
| 9 | SEQ ID NO: 5 (SEQ ID NO: 5) | GGGAATCGTTGATTTT (SEQ ID NO: 1976) |
| 10 | SEQ ID NO: 5 (SEQ ID NO: 5) | AGGGGAATTGTTGATT(SEQ ID NO: 1977) |
| 11 | SEQ ID NO: 6 (SEQ ID NO: 6) | AAGTTTATCGGCGTTT (SEQ ID NO: 1838) |
| 12 | SEQ ID NO: 6 (SEQ ID NO: 6) | AGAAGTTTATTGGTGTTT (SEQ ID NO: 1839) |
| 13 | SEQ ID NO: 6 (SEQ ID NO: 6) | ATTTCGGAATTTAAGCGT (SEQ ID NO: 1840) |
| 14 | SEQ ID NO: 6 (SEQ ID NO: 6) | TTTTGGAATTTAAGTGTT (SEQ ID NO: 1841) |
| 15 | SEQ ID NO: 6 (SEQ ID NO: 6) | TAATTTCGGACGCGGA (SEQ ID NO: 1842) |
| 16 | SEQ ID NO: 6 (SEQ ID NO: 6) | TTTTGGATGTGGAGGA (SEQ ID NO: 1843) |
| 17 | SEQ ID NO: 6 (SEQ ID NO: 6) | TTACGGTGAAGGCGGA (SEQ ID NO: 1844) |
| 18 | SEQ ID NO: 6 (SEQ ID NO: 6) | TTATGGTGAAGGTGGA (SEQ ID NO: 1845) |
| 19 | SEQ ID NO: 6 (SEQ ID NO: 6) | TTTCGGTTTTCGTTAAT (SEQ ID NO: 1846) |
| 20 | SEQ ID NO: 6 (SEQ ID NO: 6) | TTTGGTTTTTGTTAATTTAG (SEQ ID NO: 1847) |
| 21 | SEQ ID NO: 6 (SEQ ID NO: 6) | TGTGCGAAGTTAACGT (SEQ ID NO: 1848) |
| 22 | SEQ ID NO: 6 (SEQ ID NO: 6) | TTGTGTGAAGTTAATGT (SEQ ID NO: 1849) |
| 23 | SEQ ID NO: 7 (SEQ ID NO: 7) | TAGTCGTCGTGTAGGA (SEQ ID NO: 1978) |
| 24 | SEQ ID NO: 7 (SEQ ID NO: 7) | TAGGTAGTTGTTGTGTA (SEQ ID NO: 1979) |
| 25 | SEQ ID NO: 7 (SEQ ID NO: 7) | TATAGGTACGCGATGA (SEQ ID NO: 1980) |
| 26 | SEQ ID NO: 7 (SEQ ID NO: 7) | AGGTATGTGATGAGGA (SEQ ID NO: 1981) |
| 27 | SEQ ID NO: 7 (SEQ ID NO: 7) | TATGGTTACGTACGAG (SEQ ID NO: 1982) |
| 28 | SEQ ID NO: 7 (SEQ ID NO: 7) | ATGGTTATGTATGAGTTT (SEQ ID NO: 1983) |
| 29 | SEQ ID NO: 7 (SEQ ID NO: 7) | ATGATTTGCGTTACGT (SEQ ID NO: 1984) |
| 30 | SEQ ID NO: 7 (SEQ ID NO: 7) | ATGATTTGTGTTATGTTT (SEQ ID NO: 1985) |
| 31 | SEQ ID NO: 7 (SEQ ID NO: 7) | TAACGTTGTGGTTCGAA (SEQ ID NO: 1986) |
| 32 | SEQ ID NO: 7 (SEQ ID NO: 7) | TAATGTTGTGGTTTGAA (SEQ ID NO: 1987) |
| 33 | SEQ ID NO: 8 (SEQ ID NO: 8) | ATAGGGCGGGATTTTA (SEQ ID NO: 2186) |
| 34 | SEQ ID NO: 8 (SEQ ID NO: 8) | GATAGGGTGGGATTTT (SEQ ID NO: 2187) |
| 35 | SEQ ID NO: 8 (SEQ ID NO: 8) | ATAAAGCGGGGTTTTA (SEQ ID NO: 1850) |
| 36 | SEQ ID NO: 8 (SEQ ID NO: 8) | GGATAAAGTGGGGTTT (SEQ ID NO: 1851) |
| 37 | SEQ ID NO: 8 (SEQ ID NO: 8) | AGGAGGCGAGAAATTT (SEQ ID NO: 1852) |
| 38 | SEQ ID NO: 8 (SEQ ID NO: 8) | GAGGAGGTGAGAAATT (SEQ ID NO: 1853) |
| 39 | SEQ ID NO: 8 (SEQ ID NO: 8) | AGAAATTTCGGGGTAG (SEQ ID NO: 1854) |
| 40 | SEQ ID NO: 8 (SEQ ID NO: 8) | GAAATTTTGGGGTAGTA (SEQ ID NO: 1855) |
| 41 | SEQ ID NO: 8 (SEQ ID NO: 8) | GGTAGTATCGTTTATAGA (SEQ ID NO: 1856) |
| 42 | SEQ ID NO: 8 (SEQ ID NO: 8) | GGGGTAGTATTGTTTATA (SEQ ID NO: 1857) |
| 43 | SEQ ID NO: 1 (SEQ ID NO: 1) | GGTCGGCGTTGATTTTA (SEQ ID NO: 1988) |
| 44 | SEQ ID NO: 1 (SEQ ID NO: 1) | GGTTGGTGTTGATTTTA (SEQ ID NO: 1989) |
| 45 | SEQ ID NO: 1 (SEQ ID NO: 1) | GATTCGAACGGATTTT (SEQ ID NO: 1990) |
| 46 | SEQ ID NO: 1 (SEQ ID NO: 1) | GGGATTTGAATGGATTT (SEQ ID NO: 1991) |
| 47 | SEQ ID NO: 1 (SEQ ID NO: 1) | TGGGTCGGGATTCGAA (SEQ ID NO: 1992) |
| 48 | SEQ ID NO: 1 (SEQ ID NO: 1) | TGGGTTGGGATTTGAA (SEQ ID NO: 1993) |
| 49 | SEQ ID NO: 1 (SEQ ID NO: 1) | GTCGGAAGTTTCGGGA (SEQ ID NO: 1994) |
| 50 | SEQ ID NO: 1 (SEQ ID NO: 1) | GTTGGAAGTTTTGGGAT (SEQ ID NO: 1995) |
| 51 | SEQ ID NO: 1 (SEQ ID NO: 1) | TGGATATCGTAGGGTA (SEQ ID NO: 1996) |
| 52 | SEQ ID NO: 1 (SEQ ID NO: 1) | TGGATATTGTAGGGTAG (SEQ ID NO: 1997) |
| 53 | PROSTAGLANDIN E2 RECEPTOR, EP4 | AGTGTATCGTTTTTCGG (SEQ ID NO: 1858) |
| | SUBTYPE (PROSTANOID EP4 RECEPTOR) | |
| | (PGE RECEPTOR, EP4 SUBTYPE) (SEQ ID | |
| | NO: 10) | |
| 54 | PROSTAGLANDIN E2 RECEPTOR, EP4 | TAGTGTATTGTTTTTTGG (SEQ ID NO: 1859) |
| | SUBTYPE (PROSTANOID EP4 RECEPTOR) | |
| | (PGE RECEPTOR, EP4 SUBTYPE) (SEQ ID | |
| | NO: 10) | |
| 55 | PROSTAGLANDIN E2 RECEPTOR, EP4 | TTCGTTTACGGTAGTT (SEQ ID NO: 1218) |
| | SUBTYPE (PROSTANOID EP4 RECEPTOR) | |
| | (PGE RECEPTOR, EP4 SUBTYPE) (SEQ ID | |
| | NO: 10) | |
| 56 | PROSTAGLANDIN E2 RECEPTOR, EP4 | ATTTTTGTTTATGGTAGTT (SEQ ID NO: 1219) |
| | SUBTYPE (PROSTANOID EP4 RECEPTOR) | |
| | (PGE RECEPTOR, EP4 SUBTYPE) (SEQ ID | |
| | NO: 10) | |
| 57 | PROSTAGLANDIN E2 RECEPTOR, EP4 | TGCGTATCGTTAGTTA (SEQ ID NO: 1860) |
| | SUBTYPE (PROSTANOID EP4 RECEPTOR) | |
| | (PGE RECEPTOR, EP4 SUBTYPE) (SEQ ID | |
| | NO: 10) | |
| 58 | PROSTAGLANDIN E2 RECEPTOR, EP4 | AGGTTGTGTATTGTTAG (SEQ ID NO: 1861) |
| | SUBTYPE (PROSTANOID EP4 RECEPTOR) | |
| | (PGE RECEPTOR, EP4 SUBTYPE) (SEQ ID | |
| | NO: 10) | |
| 59 | PROSTAGLANDIN E2 RECEPTOR, EP4 | AGGTAATCGAGGCGGT (SEQ ID NO: 1998) |
| | SUBTYPE (PROSTANOID EP4 RECEPTOR) | |
| | (PGE RECEPTOR, EP4 SUBTYPE) (SEQ ID | |
| | NO: 10) | |
| 60 | PROSTAGLANDIN E2 RECEPTOR, EP4 | AGGTAATTGAGGTGGT (SEQ ID NO: 1999) |
| | SUBTYPE (PROSTANOID EP4 RECEPTOR) | |
| | (PGE RECEPTOR, EP4 SUBTYPE) (SEQ ID | |
| | NO: 10) | |
| 61 | PROSTAGLANDIN E2 RECEPTOR, EP4 | ATTATTTCGGCGGTGA (SEQ ID NO: 1862) |
| | SUBTYPE (PROSTANOID EP4 RECEPTOR) | |
| | (PGE RECEPTOR, EP4 SUBTYPE) (SEQ ID | |
| | NO: 10) | |
| 62 | PROSTAGLANDIN E2 RECEPTOR, EP4 | GATTATTTTGGTGGTGA (SEQ ID NO: 1863) |
| | SUBTYPE (PROSTANOID EP4 RECEPTOR) | |
| | (PGE RECEPTOR, EP4 SUBTYPE) (SEQ ID | |
| | NO: 10) | |
| 63 | PROSTAGLANDIN E2 RECEPTOR, EP4 | GGCGTCGAAAGTCGTT (SEQ ID NO: 2000) |
| | SUBTYPE (PROSTANOID EP4 RECEPTOR) | |
| | (PGE RECEPTOR, EP4 SUBTYPE) (SEQ ID | |
| | NO: 10) | |
| 64 | PROSTAGLANDIN E2 RECEPTOR, EP4 | GGTGTTGAAAGTTGTTG (SEQ ID NO: 2001) |
| | SUBTYPE (PROSTANOID EP4 RECEPTOR) | |
| | (PGE RECEPTOR, EP4 SUBTYPE) (SEQ ID | |
| | NO: 10) | |
| 65 | PROSTAGLANDIN E2 RECEPTOR, EP4 | TAAGTCGCGTAAGGAG (SEQ ID NO: 1864) |
| | SUBTYPE (PROSTANOID EP4 RECEPTOR) | |
| | (PGE RECEPTOR, EP4 SUBTYPE) (SEQ ID | |
| | NO: 10) | |
| 66 | PROSTAGLANDIN E2 RECEPTOR, EP4 | AAGTTGTGTAAGGAGTA (SEQ ID NO: 1865) |
| | SUBTYPE (PROSTANOID EP4 RECEPTOR) | |
| | (PGE RECEPTOR, EP4 SUBTYPE) (SEQ ID | |
| | NO: 10) | |
| 67 | PROSTAGLANDIN E2 RECEPTOR, EP4 | TAATCGTTTGTTTACGT (SEQ ID NO: 2002) |
| | SUBTYPE (PROSTANOID EP4 RECEPTOR) | |
| | (PGE RECEPTOR, EP4 SUBTYPE) (SEQ ID | |
| | NO: 10) | |
| 68 | PROSTAGLANDIN E2 RECEPTOR, EP4 | AATTGTTTGTTTATGTAGT (SEQ ID NO: 2003) |
| | SUBTYPE (PROSTANOID EP4 RECEPTOR) | |
| | (PGE RECEPTOR, EP4 SUBTYPE) (SEQ ID | |
| | NO: 10) | |
| 69 | PROSTAGLANDIN E2 RECEPTOR, EP4 | GTATCGCGAGTTTGGA (SEQ ID NO: 1866) |
| | SUBTYPE (PROSTANOID EP4 RECEPTOR) | |
| | (PGE RECEPTOR, EP4 SUBTYPE) (SEQ ID | |
| | NO: 10) | |
| 70 | PROSTAGLANDIN E2 RECEPTOR, EP4 | GTATTGTGAGTTTGGAG (SEQ ID NO: 1867) |
| | SUBTYPE (PROSTANOID EP4 RECEPTOR) | |
| | (PGE RECEPTOR, EP4 SUBTYPE) (SEQ ID | |
| | NO: 10) | |
| 71 | ORPHAN NUCLEAR RECEPTOR NR5A2 | TTACGGAGGCGTTTTA (SEQ ID NO: 2004) |
| | (ALPHA-1-FETOPROTEIN TRANSCRIPTION | |
| | FACTOR) (HEPATOCYTIC | |
| | TRANSCRIPTION FACTOR) (B1-BINDING | |
| | FACTOR) (HB1F) (CYP7A PROMOTER | |
| | BINDING FACTOR) (SEQ ID NO: 11) | |
| 72 | ORPHAN NUCLEAR RECEPTOR NR5A2 | TTTTATGGAGGTGTTTT (SEQ ID NO: 2005) |
| | (ALPHA-1-FETOPROTEIN TRANSCRIPTION | |
| | FACTOR) (HEPATOCYTIC | |
| | TRANSCRIPTION FACTOR) (B1-BINDING | |
| | FACTOR) (HB1F) (CYP7A PROMOTER | |
| | BINDING FACTOR) (SEQ ID NO: 11) | |
| 73 | ORPHAN NUCLEAR RECEPTOR NR5A2 | AGGCGAATTTATCGGG (SEQ ID NO: 2006) |
| | (ALPHA-1-FETOPROTEIN TRANSCRIPTION | |
| | FACTOR) (HEPATOCYTIC | |
| | TRANSCRIPTION FACTOR) (B1-BINDING | |
| | FACTOR) (HB1F) (CYP7A PROMOTER | |
| | BINDING FACTOR) (SEQ ID NO: 11) | |
| 74 | ORPHAN NUCLEAR RECEPTOR NR5A2 | GGTGAATTTATTGGGG (SEQ ID NO: 2007) |
| | (ALPHA-1-FETOPROTEIN TRANSCRIPTION | |
| | FACTOR) (HEPATOCYTIC | |
| | TRANSCRIPTION FACTOR) (B1-BINDING | |
| | FACTOR) (HB1F) (CYP7A PROMOTER | |
| | BINDING FACTOR) (SEQ ID NO: 11) | |
| 75 | ORPHAN NUCLEAR RECEPTOR NR5A2 | TAGTCGAAGTAGGCGT (SEQ ID NO: 2008) |
| | (ALPHA-1-FETOPROTEIN TRANSCRIPTION | |
| | FACTOR) (HEPATOCYTIC | |
| | TRANSCRIPTION FACTOR) (B1-BINDING | |
| | FACTOR) (HB1F) (CYP7A PROMOTER | |
| | BINDING FACTOR) (SEQ ID NO: 11) | |
| 76 | ORPHAN NUCLEAR RECEPTOR NR5A2 | TAGTTGAAGTAGGTGTT (SEQ ID NO: 2009) |
| | (ALPHA-1-FETOPROTEIN TRANSCRIPTION | |
| | FACTOR) (HEPATOCYTIC | |
| | TRANSCRIPTION FACTOR) (B1-BINDING | |
| | FACTOR) (HB1F) (CYP7A PROMOTER | |
| | BINDING FACTOR) (SEQ ID NO: 11) | |
| 77 | ORPHAN NUCLEAR RECEPTOR NR5A2 | TTTTCGACGAAGTTTT (SEQ ID NO: 2010) |
| | (ALPHA-1-FETOPROTEIN TRANSCRIPTION | |
| | FACTOR) (HEPATOCYTIC | |
| | TRANSCRIPTION FACTOR) (B1-BINDING | |
| | FACTOR) (HB1F) (CYP7A PROMOTER | |
| | BINDING FACTOR) (SEQ ID NO: 11) | |
| 78 | ORPHAN NUCLEAR RECEPTOR NR5A2 | TTTTGATGAAGTTTTGTT (SEQ ID NO: 2011) |
| | (ALPHA-1-FETOPROTEIN TRANSCRIPTION | |
| | FACTOR) (HEPATOCYTIC | |
| | TRANSCRIPTION FACTOR) (B1-BINDING | |
| | FACTOR) (HB1F) (CYP7A PROMOTER | |
| | BINDING FACTOR) (SEQ ID NO: 11) | |
| 79 | LIM DOMAIN KINASE 1 (EC 2.7.1.37) | TGTAGTCGGGAGGTTA (SEQ ID NO: 2012) |
| | (LIMK-1) (SEQ ID NO: 12) | |
| 80 | LIM DOMAIN KINASE 1 (EC 2.7.1.37) | TGTAGTTGGGAGGTTA (SEQ ID NO: 2013) |
| | (LIMK-1) (SEQ ID NO: 12) | |
| 81 | LIM DOMAIN KINASE 1 (EC 2.7.1.37) | GGATTATCGCGGGGGT (SEQ ID NO: 2014) |
| | (LIMK-1) (SEQ ID NO: 12) | |
| 82 | LIM DOMAIN KINASE 1 (EC 2.7.1.37) | GGATTATTGTGGGGGT (SEQ ID NO: 2015) |
| | (LIMK-1) (SEQ ID NO: 12) | |
| 83 | LIM DOMAIN KINASE 1 (EC 2.7.1.37) | GTCGGTAGTTTATCGGAT (SEQ ID NO: 2016) |
| | (LIMK-1) (SEQ ID NO: 12) | |
| 84 | LIM DOMAIN KINASE 1 (EC 2.7.1.37) | GTTGGTAGTTTATTGGAT (SEQ ID NO: 2017) |
| | (LIMK-1) (SEQ ID NO: 12) | |
| 85 | LIM DOMAIN KINASE 1 (EC 2.7.1.37) | TAGGAGACGTTACGTT (SEQ ID NO: 2018) |
| | (LIMK-1) (SEQ ID NO: 12) | |
| 86 | LIM DOMAIN KINASE 1 (EC 2.7.1.37) | AGATGTTATGTTAGGGT (SEQ ID NO: 2019) |
| | (LIMK-1) (SEQ ID NO: 12) | |
| 87 | KOX7 (SEQ ID NO: 49) | TAATTAGGCGCGAGGT (SEQ ID NO: 1220) |
| 88 | KOX7 (SEQ ID NO: 49) | TTAGGTGTGAGGTAGA (SEQ ID NO: 1221) |
| 89 | KOX7 (SEQ ID NO: 49) | TTAAAGTCGTGGGCGG (SEQ ID NO: 1222) |
| 90 | KOX7 (SEQ ID NO: 49) | TTAAAGTTGTGGGTGG (SEQ ID NO: 1223) |
| 91 | KOX7 (SEQ ID NO: 49) | GGTCGGGTTATAACGTA (SEQ ID NO: 1224) |
| 92 | KOX7 (SEQ ID NO: 49) | GGGTTGGGTTATAATGT (SEQ ID NO: 1225) |
| 93 | KOX7 (SEQ ID NO: 49) | TAAACGTTTTTCGGGA (SEQ ID NO: 1226) |
| 94 | KOX7 (SEQ ID NO: 49) | GGTAAATGTTTTTTGGG (SEQ ID NO: 1227) |
| 95 | BCL11B (SEQ ID NO: 50) | TAGGTTTCGATTCGTT (SEQ ID NO: 2020) |
| 96 | BCL11B (SEQ ID NO: 50) | TTAGGTTTTGATTTGTTT (SEQ ID NO: 2021) |
| 97 | BCL11B (SEQ ID NO: 50) | AAGTCGTCGGAGTTAG (SEQ ID NO: 2022) |
| 98 | BCL11B (SEQ ID NO: 50) | GTGAAGTTGTTGGAGT (SEQ ID NO: 2023) |
| 99 | BCL11B (SEQ ID NO: 50) | TTGAGGCGTTACGGTT (SEQ ID NO: 2024) |
| 100 | BCL11B (SEQ ID NO: 50) | TTGAGGTGTTATGGTT (SEQ ID NO: 2025) |
| 101 | BCL11B (SEQ ID NO: 50) | TTCGGGACGAAAATAA (SEQ ID NO: 1228) |
| 102 | BCL11B (SEQ ID NO: 50) | AAGATTTTTGGGATGAA (SEQ ID NO: 1229) |
| 103 | BCL11B (SEQ ID NO: 50) | GTTTTCGTTTACGGAT (SEQ ID NO: 1230) |
| 104 | BCL11B (SEQ ID NO: 50) | TGTTTTTGTTTATGGATT (SEQ ID NO: 1231) |
| 105 | SEQ ID NO: 51 (SEQ ID NO: 51) | TAAATTTCGGACGAGT (SEQ ID NO: 1232) |
| 106 | SEQ ID NO: 51 (SEQ ID NO: 51) | TTTAAATTTTGGATGAGTT (SEQ ID NO: 1233) |
| 107 | SEQ ID NO: 51 (SEQ ID NO: 51) | TTTACGGAGTTTCGGT (SEQ ID NO: 1234) |
| 108 | SEQ ID NO: 51 (SEQ ID NO: 51) | TTTTATGGAGTTTTGGT (SEQ ID NO: 1235) |
| 109 | SEQ ID NO: 51 (SEQ ID NO: 51) | GTCGGGGTCGATTCGA (SEQ ID NO: 1868) |
| 110 | SEQ ID NO: 51 (SEQ ID NO: 51) | GTTGGGGTTGATTTGAT (SEQ ID NO: 1869) |
| 111 | SEQ ID NO: 51 (SEQ ID NO: 51) | AGGATTCGTTTGCGTT (SEQ ID NO: 1870) |
| 112 | SEQ ID NO: 51 (SEQ ID NO: 51) | AAGGATTTGTTTGTGTT (SEQ ID NO: 1871) |
| 113 | SEQ ID NO: 51 (SEQ ID NO: 51) | TAGACGTTAGAGAACGT (SEQ ID NO: 1236) |
| 114 | SEQ ID NO: 51 (SEQ ID NO: 51) | AGATGTTAGAGAATGTTT (SEQ ID NO: 1237) |
| 115 | MGC34831 (SEQ ID NO: 52) | ATTAGCGTTTGGCGTT (SEQ ID NO: 1872) |
| 116 | MGC34831 (SEQ ID NO: 52) | AATTAGTGTTTGGTGTT (SEQ ID NO: 1873) |
| 117 | MGC34831 (SEQ ID NO: 52) | GTTTAGCGACGGTCGT (SEQ ID NO: 1874) |
| 118 | MGC34831 (SEQ ID NO: 52) | TGTTTAGTGATGGTTGT (SEQ ID NO: 1875) |
| 119 | MGC34831 (SEQ ID NO: 52) | GTCGGACGGATTTATA (SEQ ID NO: 2210) |
| 120 | MGC34831 (SEQ ID NO: 52) | TGGTTGGATGGATTTAT (SEQ ID NO: 2211) |
| 121 | MGC34831 (SEQ ID NO: 52) | TTCGTTTTTCGGGATA (SEQ ID NO: 1238) |
| 122 | MGC34831 (SEQ ID NO: 52) | TTTGTTTTTTGGGATATG (SEQ ID NO: 1239) |
| 123 | COL5A1 (SEQ ID NO: 53) | AGGGATAGCGTTTTTT (SEQ ID NO: 1240) |
| 124 | COL5A1 (SEQ ID NO: 53) | AGGGATAGTGTTTTTTG (SEQ ID NO: 1241) |
| 125 | COL5A1 (SEQ ID NO: 53) | TAAGTGTTCGGGGGTA (SEQ ID NO: 1242) |
| 126 | COL5A1 (SEQ ID NO: 53) | TAAGTGTTTGGGGGTA (SEQ ID NO: 1243) |
| 127 | COL5A1 (SEQ ID NO: 53) | TACGAGGCGGGTAAAT (SEQ ID NO: 1244) |
| 128 | COL5A1 (SEQ ID NO: 53) | GTTTATGAGGTGGGTA (SEQ ID NO: 1245) |
| 129 | COL5A1 (SEQ ID NO: 53) | TATAGGCGTTTAGTTTG (SEQ ID NO: 1246) |
| 130 | COL5A1 (SEQ ID NO: 53) | ATTATAGGTGTTTAGTTTG (SEQ ID NO: 1247) |
| 131 | COL5A1 (SEQ ID NO: 53) | TTAAATCGGGTAGGGT (SEQ ID NO: 1248) |
| 132 | COL5A1 (SEQ ID NO: 53) | TTTAAATTGGGTAGGGT (SEQ ID NO: 1249) |
| 133 | SEQ ID NO: 54 (SEQ ID NO: 54) | TGTTATCGCGTAGGTT (SEQ ID NO: 1250) |
| 134 | SEQ ID NO: 54 (SEQ ID NO: 54) | GTGTTATTGTGTAGGTT (SEQ ID NO: 1251) |
| 135 | SEQ ID NO: 54 (SEQ ID NO: 54) | AGCGATGTATTCGTTT (SEQ ID NO: 1252) |
| 136 | SEQ ID NO: 54 (SEQ ID NO: 54) | GAGAGTGATGTATTTGT (SEQ ID NO: 1253) |
| 137 | SEQ ID NO: 54 (SEQ ID NO: 54) | TGTGTAGCGGCGATTA (SEQ ID NO: 1876) |
| 138 | SEQ ID NO: 54 (SEQ ID NO: 54) | GTGTGTAGTGGTGATT (SEQ ID NO: 1877) |
| 139 | SEQ ID NO: 54 (SEQ ID NO: 54) | ATTAGCGTTTGGTCGG (SEQ ID NO: 1878) |
| 140 | SEQ ID NO: 54 (SEQ ID NO: 54) | ATTAGTGTTTGGTTGGG (SEQ ID NO: 1879) |
| 141 | SEQ ID NO: 54 (SEQ ID NO: 54) | GACGGGGCGAGTTAGT (SEQ ID NO: 1254) |
| 142 | SEQ ID NO: 54 (SEQ ID NO: 54) | GATGGGGTGAGTTAGT (SEQ ID NO: 1255) |
| 143 | PDLIM1 (SEQ ID NO: 55) | GATTCGCGGGGATAGA (SEQ ID NO: 1256) |
| 144 | PDLIM1 (SEQ ID NO: 55) | GATTTGTGGGGATAGA (SEQ ID NO: 1257) |
| 145 | PDLIM1 (SEQ ID NO: 55) | TAATCGCGAGGGTTAG (SEQ ID NO: 1258) |
| 146 | PDLIM1 (SEQ ID NO: 55) | GGTAATTGTGAGGGTT (SEQ ID NO: 1259) |
| 147 | PDLIM1 (SEQ ID NO: 55) | TAGGTCGCGTAGTCGT (SEQ ID NO: 1880) |
| 148 | PDLIM1 (SEQ ID NO: 55) | TTAGGTTGTGTAGTTGT (SEQ ID NO: 1881) |
| 149 | PDLIM1 (SEQ ID NO: 55) | GAGTTTCGTCGAGAGA (SEQ ID NO: 1260) |
| 150 | PDLIM1 (SEQ ID NO: 55) | GGAGTTTTGTTGAGAGA (SEQ ID NO: 1261) |
| 151 | PDLIM1 (SEQ ID NO: 55) | AGAGCGCGAGTTAGAT (SEQ ID NO: 1262) |
| 152 | PDLIM1 (SEQ ID NO: 55) | AGAGAGTGTGAGTTAGA (SEQ ID NO: 1263) |
| 153 | MSF (SEQ ID NO: 13) | GTTTCGAAATTGGCGT (SEQ ID NO: 2026) |
| 154 | MSF (SEQ ID NO: 13) | TTTGAAATTGGTGTGG (SEQ ID NO: 2027) |
| 155 | MSF (SEQ ID NO: 13) | TTCGGTTTACGGGTTGTA (SEQ ID NO: 2028) |
| 156 | MSF (SEQ ID NO: 13) | TTTGGTTTATGGGTTGTA (SEQ ID NO: 2029) |
| 157 | MSF (SEQ ID NO: 13) | TTACGGTTCGATTTTG (SEQ ID NO: 2030) |
| 158 | MSF (SEQ ID NO: 13) | TATGGTTTGATTTTGGG (SEQ ID NO: 2031) |
| 159 | MSF (SEQ ID NO: 13) | TTCGTACGTAGGTTTT (SEQ ID NO: 1264) |
| 160 | MSF (SEQ ID NO: 13) | TTTGTTTGTATGTAGGTT (SEQ ID NO: 1265) |
| 161 | MSF (SEQ ID NO: 13) | TAGGAAAGCGTACGTA (SEQ ID NO: 1266) |
| 162 | MSF (SEQ ID NO: 13) | AGGAAAGTGTATGTATTT (SEQ ID NO: 1267) |
| 163 | SEQ ID NO: 14 (SEQ ID NO: 14) | TAAGGCGTTTTCGATA (SEQ ID NO: 2032) |
| 164 | SEQ ID NO: 14 (SEQ ID NO: 14) | GTAAGGTGTTTTTGATAT (SEQ ID NO: 2033) |
| 165 | SEQ ID NO: 14 (SEQ ID NO: 14) | TGGGTGTACGCGTGAA (SEQ ID NO: 2034) |
| 166 | SEQ ID NO: 14 (SEQ ID NO: 14) | TGTATGTGTGAAGGGG (SEQ ID NO: 2035) |
| 167 | SEQ ID NO: 14 (SEQ ID NO: 14) | AAATACGTATTTTCGGT (SEQ ID NO: 1268) |
| 168 | SEQ ID NO: 14 (SEQ ID NO: 14) | ATATGTATTTTTGGTAGTT (SEQ ID NO: 1269) |
| 169 | SEQ ID NO: 15 (SEQ ID NO: 15) | AATCGTGCGGTTGATA (SEQ ID NO: 1882) |
| 170 | SEQ ID NO: 15 (SEQ ID NO: 15) | TGTAGAATTGTGTGGT (SEQ ID NO: 1883) |
| 171 | SEQ ID NO: 15 (SEQ ID NO: 15) | TTGCGTAGAAAATTCGAG (SEQ ID NO: 1884) |
| 172 | SEQ ID NO: 15 (SEQ ID NO: 15) | TTGTGTAGAAAATTTGAG (SEQ ID NO: 1885) |
| 173 | SEQ ID NO: 15 (SEQ ID NO: 15) | AAAATTCGAGGTCGGG (SEQ ID NO: 1886) |
| 174 | SEQ ID NO: 15 (SEQ ID NO: 15) | AAAATTTGAGGTTGGG (SEQ ID NO: 1887) |
| 175 | SEQ ID NO: 15 (SEQ ID NO: 15) | AATAGGCGATGTACGG (SEQ ID NO: 2214) |
| 176 | SEQ ID NO: 15 (SEQ ID NO: 15) | TAGGTGATGTATGGGT (SEQ ID NO: 2215) |
| 177 | SEQ ID NO: 15 (SEQ ID NO: 15) | TAATCGAGTTTAGCGG (SEQ ID NO: 2216) |
| 178 | SEQ ID NO: 15 (SEQ ID NO: 15) | TTAATTGAGTTTAGTGGT (SEQ ID NO: 2217) |
| 179 | SEQ ID NO: 16 (SEQ ID NO: 16) | ATCGTTGGTCGGATTT (SEQ ID NO: 2036) |
| 180 | SEQ ID NO: 16 (SEQ ID NO: 16) | TAGGATTGTTGGTTGGA (SEQ ID NO: 2037) |
| 181 | SEQ ID NO: 16 (SEQ ID NO: 16) | AGGAGTTTTCGTGTCGT (SEQ ID NO: 2038) |
| 182 | SEQ ID NO: 16 (SEQ ID NO: 16) | AGGAGTTTTTGTGTTGT (SEQ ID NO: 2039) |
| 183 | SEQ ID NO: 16 (SEQ ID NO: 16) | TTACGGATAGGGCGAT (SEQ ID NO: 2040) |
| 184 | SEQ ID NO: 16 (SEQ ID NO: 16) | TATGGATAGGGTGATTT (SEQ ID NO: 2041) |
| 185 | SEQ ID NO: 16 (SEQ ID NO: 16) | AGGCGTTGTCGGTGAT (SEQ ID NO: 2042) |
| 186 | SEQ ID NO: 16 (SEQ ID NO: 16) | AGGTGTTGTTGGTGATA (SEQ ID NO: 2043) |
| 187 | SEQ ID NO: 16 (SEQ ID NO: 16) | AAGTAGATCGGGACGA (SEQ ID NO: 1270) |
| 188 | SEQ ID NO: 16 (SEQ ID NO: 16) | TAGATTGGGATGAGGA (SEQ ID NO: 1271) |
| 189 | SEQ ID NO: 17 (SEQ ID NO: 17) | TACGTTTCGGGTTTGTTA (SEQ ID NO: 2044) |
| 190 | SEQ ID NO: 17 (SEQ ID NO: 17) | TATGTTTTGGGTTTGTTA (SEQ ID NO: 2045) |
| 191 | SEQ ID NO: 17 (SEQ ID NO: 17) | ATTTAGTCGTGCGTTT (SEQ ID NO: 2046) |
| 192 | SEQ ID NO: 17 (SEQ ID NO: 17) | TGATTTAGTTGTGTGTT (SEQ ID NO: 2047) |
| 193 | SEQ ID NO: 17 (SEQ ID NO: 17) | GGTGATTTCGACGGTT (SEQ ID NO: 1272) |
| 194 | SEQ ID NO: 17 (SEQ ID NO: 17) | AGGTGATTTTGATGGTT (SEQ ID NO: 1273) |
| 195 | SEQ ID NO: 17 (SEQ ID NO: 17) | AGTAGCGTAATTTCGA (SEQ ID NO: 1274) |
| 196 | SEQ ID NO: 17 (SEQ ID NO: 17) | AGTGTAATTTTGAGGTG (SEQ ID NO: 1275) |
| 197 | SEQ ID NO: 17 (SEQ ID NO: 17) | TATGGCGCGTATGTAT (SEQ ID NO: 1276) |
| 198 | SEQ ID NO: 17 (SEQ ID NO: 17) | GATTATGGTGTGTATGT (SEQ ID NO: 1277) |
| 199 | SEQ ID NO: 18 (SEQ ID NO: 18) | TTTACGCGGGGTTTTA (SEQ ID NO: 2048) |
| 200 | SEQ ID NO: 18 (SEQ ID NO: 18) | TTTATGTGGGGTTTTAG (SEQ ID NO: 2049) |
| 201 | SEQ ID NO: 18 (SEQ ID NO: 18) | TTACGTCGTTATTAGGT (SEQ ID NO: 2050) |
| 202 | SEQ ID NO: 18 (SEQ ID NO: 18) | TTTTATGTTGTTATTAGGT (SEQ ID NO: 2051) |
| 203 | SEQ ID NO: 18 (SEQ ID NO: 18) | TATTTGGACGTCGGGT (SEQ ID NO: 2052) |
| 204 | SEQ ID NO: 18 (SEQ ID NO: 18) | TATTTGGATGTTGGGT (SEQ ID NO: 2053) |
| 205 | SEQ ID NO: 18 (SEQ ID NO: 18) | GAGGCGTATTAGGTCGG (SEQ ID NO: 2054) |
| 206 | SEQ ID NO: 18 (SEQ ID NO: 18) | AGGTGTATTAGGTTGGG (SEQ ID NO: 2055) |
| 207 | SEQ ID NO: 18 (SEQ ID NO: 18) | AAAGCGGAGTCGTTAG (SEQ ID NO: 2056) |
| 208 | SEQ ID NO: 18 (SEQ ID NO: 18) | AGTGGAGTTGTTAGGT (SEQ ID NO: 2057) |
| 209 | SEQ ID NO: 19 (SEQ ID NO: 19) | AGGTTTTCGTTGTAGTA (SEQ ID NO: 2058) |
| 210 | SEQ ID NO: 19 (SEQ ID NO: 19) | TAGGTTTTTGTTGTAGTA (SEQ ID NO: 2059) |
| 211 | SEQ ID NO: 19 (SEQ ID NO: 19) | TTTGATATCGAGGGAG (SEQ ID NO: 2198) |
| 212 | SEQ ID NO: 19 (SEQ ID NO: 19) | TTTGATATTGAGGGAGG (SEQ ID NO: 2199) |
| 213 | SEQ ID NO: 19 (SEQ ID NO: 19) | GGTGTACGGAGGAAAG (SEQ ID NO: 2200) |
| 214 | SEQ ID NO: 19 (SEQ ID NO: 19) | GGTGTATGGAGGAAAG (SEQ ID NO: 2201) |
| 215 | SEQ ID NO: 19 (SEQ ID NO: 19) | TGAGATTCGTTTTTTAAA (SEQ ID NO: 2060) |
| 216 | SEQ ID NO: 19 (SEQ ID NO: 19) | GGTGAGATTTGTTTTTTA (SEQ ID NO: 2061) |
| 217 | PRDM6 (SEQ ID NO: 20) | AGTTTTAAGCGTTTGGT (SEQ ID NO: 2062) |
| 218 | PRDM6 (SEQ ID NO: 20) | AGTTTTAAGTGTTTGGT (SEQ ID NO: 2063) |
| 219 | PRDM6 (SEQ ID NO: 20) | GAAGTTCGGATTTCGG (SEQ ID NO: 2064) |
| 220 | PRDM6 (SEQ ID NO: 20) | GGAAGTTTGGATTTTGG (SEQ ID NO: 2065) |
| 221 | PRDM6 (SEQ ID NO: 20) | TTGTCGGGTTACGGGA (SEQ ID NO: 2066) |
| 222 | PRDM6 (SEQ ID NO: 20) | GTTGGGTTATGGGAGA (SEQ ID NO: 2067) |
| 223 | PRDM6 (SEQ ID NO: 20) | TTCGTAGAATTGTCGAAG (SEQ ID NO: 2068) |
| 224 | PRDM6 (SEQ ID NO: 20) | TTTGTAGAATTGTTGAAG (SEQ ID NO: 2069) |
| 225 | RAP2B (SEQ ID NO: 21) | AGATGTTTCGATTTGTT (SEQ ID NO: 1278) |
| 226 | RAP2B (SEQ ID NO: 21) | GAGATGTTTTGATTTGTT (SEQ ID NO: 1279) |
| 227 | RAP2B (SEQ ID NO: 21) | GGGTAATCGTTAGATTT (SEQ ID NO: 1280) |
| 228 | RAP2B (SEQ ID NO: 21) | GGTAATTGTTAGATTTGG (SEQ ID NO: 1281) |
| 229 | RAP2B (SEQ ID NO: 21) | GGTCGGGTAATCGTTA (SEQ ID NO: 2070) |
| 230 | RAP2B (SEQ ID NO: 21) | GTTGGGTAATTGTTAGA (SEQ ID NO: 2071) |
| 231 | RAP2B (SEQ ID NO: 21) | AGGAAGCGTTTTCGTT (SEQ ID NO: 2072) |
| 232 | RAP2B (SEQ ID NO: 21) | AGAGGAAGTGTTTTTGT (SEQ ID NO: 2073) |
| 233 | NR2E1 (SEQ ID NO: 22) | AATGTAGCGGCGTTAT (SEQ ID NO: 2074) |
| 234 | NR2E1 (SEQ ID NO: 22) | TAAATGTAGTGGTGTTAT (SEQ ID NO: 2075) |
| 235 | NR2E1 (SEQ ID NO: 22) | GTCGTTATCGGTTTGGA (SEQ ID NO: 2076) |
| 236 | NR2E1 (SEQ ID NO: 22) | GTTGTTATTGGTTTGGA (SEQ ID NO: 2077) |
| 237 | NR2E1 (SEQ ID NO: 22) | GACGTAAGTTTCGGGT (SEQ ID NO: 2078) |
| 238 | NR2E1 (SEQ ID NO: 22) | GGATGTAAGTTTTGGG (SEQ ID NO: 2079) |
| 239 | NR2E1 (SEQ ID NO: 22) | TTTTTAGTCGCGAGAA (SEQ ID NO: 2080) |
| 240 | NR2E1 (SEQ ID NO: 22) | TTTTTAGTTGTGAGAAGT (SEQ ID NO: 2081) |
| 241 | NR2E1 (SEQ ID NO: 22) | TTCGGGTGATATCGTTT (SEQ ID NO: 2082) |
| 242 | NR2E1 (SEQ ID NO: 22) | TTTGGGTGATATTGTTT (SEQ ID NO: 2083) |
| 243 | NR2E1 (SEQ ID NO: 22) | AGGCGAGTCGGAGTTT (SEQ ID NO: 2084) |
| 244 | NR2E1 (SEQ ID NO: 22) | AGGTGAGTTGGAGTTTT (SEQ ID NO: 2085) |
| 245 | NR2E1 (SEQ ID NO: 22) | TAAGTCGAGCGAGTTT (SEQ ID NO: 2086) |
| 246 | NR2E1 (SEQ ID NO: 22) | TAGTAAGTTGAGTGAGT (SEQ ID NO: 2087) |
| 247 | NR2E1 (SEQ ID NO: 22) | AGGGACGCGAAAATTT (SEQ ID NO: 2088) |
| 248 | NR2E1 (SEQ ID NO: 22) | GGAGGGATGTGAAAAT (SEQ ID NO: 2089) |
| 249 | PCDH7 (SEQ ID NO: 23) | ATCGTAGTCGGTTTTA (SEQ ID NO: 2090) |
| 250 | PCDH7 (SEQ ID NO: 23) | GATTATTGTAGTTGGTTT (SEQ ID NO: 2091) |
| 251 | PCDH7 (SEQ ID NO: 23) | AAAGTGTAGCGTTATTT (SEQ ID NO: 1282) |
| 252 | PCDH7 (SEQ ID NO: 23) | AAAGTGTAGTGTTATTTAT (SEQ ID NO: 1283) |
| 253 | PCDH7 (SEQ ID NO: 23) | TTGGAAATTTCGATATTAT (SEQ ID NO: 1284) |
| 254 | PCDH7 (SEQ ID NO: 23) | TGGAAATTTTGATATTATTT (SEQ ID NO: 1285) |
| 255 | DKK3 (SEQ ID NO: 24) | ATTCGTTTTAGTTCGAG (SEQ ID NO: 1888) |
| 256 | DKK3 (SEQ ID NO: 24) | ATTTGTTTTAGTTTGAGT (SEQ ID NO: 1889) |
| 257 | DKK3 (SEQ ID NO: 24) | TTCGATCGTTTTAGGA (SEQ ID NO: 1890) |
| 258 | DKK3 (SEQ ID NO: 24) | AGTTTTGATTGTTTTAGG (SEQ ID NO: 1891) |
| 259 | DKK3 (SEQ ID NO: 24) | TTTCGGAACGCGATTA (SEQ ID NO: 1286) |
| 260 | DKK3 (SEQ ID NO: 24) | GTGTTTTGGAATGTGA (SEQ ID NO: 1287) |
| 261 | DKK3 (SEQ ID NO: 24) | ATTCGTTCGGAGACGG (SEQ ID NO: 1892) |
| 262 | DKK3 (SEQ ID NO: 24) | TTTGTTTGGAGATGGG (SEQ ID NO: 1893) |
| 263 | DKK3 (SEQ ID NO: 24) | GAAAAGACGCGATTTT (SEQ ID NO: 1894) |
| 264 | DKK3 (SEQ ID NO: 24) | GAAAAGATGTGATTTTATT (SEQ ID NO: 1895) |
| 265 | RTTN (SEQ ID NO: 25) | AATGGTCGTGTTACGT (SEQ ID NO: 1288) |
| 266 | RTTN (SEQ ID NO: 25) | ATGGTTGTGTTATGTTT (SEQ ID NO: 1289) |
| 267 | RTTN (SEQ ID NO: 25) | TAGATTGACGGGACGA (SEQ ID NO: 2228) |
| 268 | RTTN (SEQ ID NO: 25) | TAGATTGATGGGATGAG (SEQ ID NO: 2229) |
| 269 | RTTN (SEQ ID NO: 25) | TAGTGGCGCGGTAGTT (SEQ ID NO: 2092) |
| 270 | RTTN (SEQ ID NO: 25) | TAGTGGTGTGGTAGTTT (SEQ ID NO: 2093) |
| 271 | RTTN (SEQ ID NO: 25) | TAGGACGTGTTTTCGG (SEQ ID NO: 2094) |
| 272 | RTTN (SEQ ID NO: 25) | AGGATGTGTTTTTGGG (SEQ ID NO: 2095) |
| 273 | RTTN (SEQ ID NO: 25) | TTGCGGAATTTATCGTT (SEQ ID NO: 1290) |
| 274 | RTTN (SEQ ID NO: 25) | TGTGGAATTTATTGTTTT (SEQ ID NO: 1291) |
| 275 | SNAP25 (SEQ ID NO: 33) | TATTTCGAGTTAGAGTTACGA (SEQ ID NO: 2096) |
| 276 | SNAP25 (SEQ ID NO: 33) | TATTTTGAGTTAGAGTTATGA (SEQ ID NO: 2097) |
| 277 | SNAP25 (SEQ ID NO: 33) | ATACGGAATATCGTATTT (SEQ ID NO: 2098) |
| 278 | SNAP25 (SEQ ID NO: 33) | GTGTATATATGGAATATTGT (SEQ ID NO: 2099) |
| 279 | SNAP25 (SEQ ID NO: 33) | GTTATTATTCGGTACGT (SEQ ID NO: 2202) |
| 280 | SNAP25 (SEQ ID NO: 33) | AGTTATTATTTGGTATGTAT (SEQ ID NO: 2203) |
| 281 | SEQ ID NO: 26 (SEQ ID NO: 26) | TTAAGTATCGAGGCGT (SEQ ID NO: 2100) |
| 282 | SEQ ID NO: 26 (SEQ ID NO: 26) | TTTTAAGTATTGAGGTGT (SEQ ID NO: 2101) |
| 283 | SEQ ID NO: 26 (SEQ ID NO: 26) | AATTTTGGTCGTTTAGT (SEQ ID NO: 2102) |
| 284 | SEQ ID NO: 26 (SEQ ID NO: 26) | AAATTTTGGTTGTTTAGT (SEQ ID NO: 2103) |
| 285 | SEQ ID NO: 26 (SEQ ID NO: 26) | TTCGTATTGACGTTAAT (SEQ ID NO: 2104) |
| 286 | SEQ ID NO: 26 (SEQ ID NO: 26) | TTTGTATTGATGTTAATAGA (SEQ ID NO: 2105) |
| 287 | GIRK2 (SEQ ID NO: 27) | AGTTGTTCGTAGGCGA (SEQ ID NO: 2106) |
| 288 | GIRK2 (SEQ ID NO: 27) | AGTTGTTTGTAGGTGA (SEQ ID NO: 2107) |
| 289 | GIRK2 (SEQ ID NO: 27) | TTATTTCGTTCGTAGTT (SEQ ID NO: 2108) |
| 290 | GIRK2 (SEQ ID NO: 27) | TTTGTTTGTAGTTAGGTA (SEQ ID NO: 2109) |
| 291 | GIRK2 (SEQ ID NO: 27) | TTGAAATTCGTACGGG (SEQ ID NO: 1292) |
| 292 | GIRK2 (SEQ ID NO: 27) | AAATTTGTATGGGGGG (SEQ ID NO: 1293) |
| 293 | GIRK2 (SEQ ID NO: 27) | TTAGTCGAAAGGCGAG (SEQ ID NO: 2110) |
| 294 | GIRK2 (SEQ ID NO: 27) | TAGTTGAAAGGTGAGG (SEQ ID NO: 2111) |
| 295 | SEQ ID NO: 28 (SEQ ID NO: 28) | GAGTAACGCGTGTGAT (SEQ ID NO: 1294) |
| 296 | SEQ ID NO: 28 (SEQ ID NO: 28) | TATGAGTAATGTGTGTG (SEQ ID NO: 1295) |
| 297 | SEQ ID NO: 28 (SEQ ID NO: 28) | TTTTCGGTAAGTTTACGG (SEQ ID NO: 1296) |
| 298 | SEQ ID NO: 28 (SEQ ID NO: 28) | TTTTTGGTAAGTTTATGG (SEQ ID NO: 1297) |
| 299 | SEQ ID NO: 28 (SEQ ID NO: 28) | ATAAGACGGAGTTCGT (SEQ ID NO: 1298) |
| 300 | SEQ ID NO: 28 (SEQ ID NO: 28) | AAGATGGAGTTTGTTTG (SEQ ID NO: 1299) |
| 301 | SEQ ID NO: 28 (SEQ ID NO: 28) | ATTAGGCGAGTTTCGT (SEQ ID NO: 2112) |
| 302 | SEQ ID NO: 28 (SEQ ID NO: 28) | TTAGGTGAGTTTTGTTT (SEQ ID NO: 2113) |
| 303 | SEQ ID NO: 28 (SEQ ID NO: 28) | TATCGACGTTTTTGGT (SEQ ID NO: 1896) |
| 304 | SEQ ID NO: 28 (SEQ ID NO: 28) | TATTGATGTTTTTGGTTT (SEQ ID NO: 1897) |
| 305 | SEQ ID NO: 28 (SEQ ID NO: 28) | ATTCGGTGAAGCGATT (SEQ ID NO: 1300) |
| 306 | SEQ ID NO: 28 (SEQ ID NO: 28) | ATTTGGTGAAGTGATTT (SEQ ID NO: 1301) |
| 307 | SEQ ID NO: 28 (SEQ ID NO: 28) | GTTCGTAGCGGTAGGT (SEQ ID NO: 1302) |
| 308 | SEQ ID NO: 28 (SEQ ID NO: 28) | TTTGTAGTGGTAGGTGA (SEQ ID NO: 1303) |
| 309 | SEQ ID NO: 28 (SEQ ID NO: 28) | TGGACGGAGACGAAAG (SEQ ID NO: 1304) |
| 310 | SEQ ID NO: 28 (SEQ ID NO: 28) | GGATGGAGATGAAAGGA (SEQ ID NO: 1305) |
| 311 | SEQ ID NO: 29 (SEQ ID NO: 29) | TTGATGCGGAGTTCGA (SEQ ID NO: 1898) |
| 312 | SEQ ID NO: 29 (SEQ ID NO: 29) | TTGATGTGGAGTTTGA (SEQ ID NO: 1899) |
| 313 | SEQ ID NO: 29 (SEQ ID NO: 29) | TTCGAAGCGTGTATTA (SEQ ID NO: 2188) |
| 314 | SEQ ID NO: 29 (SEQ ID NO: 29) | GGGTTTGAAGTGTGTA (SEQ ID NO: 2189) |
| 315 | SEQ ID NO: 29 (SEQ ID NO: 29) | TTTTCGCGTTTGCGAA (SEQ ID NO: 2190) |
| 316 | SEQ ID NO: 29 (SEQ ID NO: 29) | TTTGTGTTTGTGAAAGG (SEQ ID NO: 2191) |
| 317 | SEQ ID NO: 29 (SEQ ID NO: 29) | TAGGAACGGTAGGCGG (SEQ ID NO: 1900) |
| 318 | SEQ ID NO: 29 (SEQ ID NO: 29) | TAGGAATGGTAGGTGG (SEQ ID NO: 1901) |
| 319 | SEQ ID NO: 29 (SEQ ID NO: 29) | GTCGGAGGCGTTTGAG (SEQ ID NO: 1902) |
| 320 | SEQ ID NO: 29 (SEQ ID NO: 29) | GTTGGAGGTGTTTGAGA (SEQ ID NO: 1903) |
| 321 | ARL7 (SEQ ID NO: 30) | TAGATTTCGTAGTTTTTTA (SEQ ID NO: 1904) |
| 322 | ARL7 (SEQ ID NO: 30) | TAGATTTTGTAGTTTTTTAA (SEQ ID NO: 1905) |
| 323 | ARL7 (SEQ ID NO: 30) | TGGGTACGTTTACGGT (SEQ ID NO: 1906) |
| 324 | ARL7 (SEQ ID NO: 30) | TGGGTATGTTTATGGTT (SEQ ID NO: 1907) |
| 325 | ARL7 (SEQ ID NO: 30) | GAAGAAATCGTTTTTGT (SEQ ID NO: 1908) |
| 326 | ARL7 (SEQ ID NO: 30) | GAAGAAATTGTTTTTGTT (SEQ ID NO: 1909) |
| 327 | ARL7 (SEQ ID NO: 30) | TAGTAGGATCGGTTTTT (SEQ ID NO: 1910) |
| 328 | ARL7 (SEQ ID NO: 30) | ATAGTAGGATTGGTTTTT (SEQ ID NO: 1911) |
| 329 | SEQ ID NO: 31 (SEQ ID NO: 31) | TTTACGTAGGGCGATT (SEQ ID NO: 2114) |
| 330 | SEQ ID NO: 31 (SEQ ID NO: 31) | ATTTTTATGTAGGGTGAT (SEQ ID NO: 2115) |
| 331 | SEQ ID NO: 31 (SEQ ID NO: 31) | AACGTTGCGTTGGGTA (SEQ ID NO: 1912) |
| 332 | SEQ ID NO: 31 (SEQ ID NO: 31) | AATGTTGTGTTGGGTAA (SEQ ID NO: 1913) |
| 333 | SEQ ID NO: 31 (SEQ ID NO: 31) | TAGCGTTTCGTGGTTA (SEQ ID NO: 1914) |
| 334 | SEQ ID NO: 31 (SEQ ID NO: 31) | GTAGTGTTTTGTGGTTA (SEQ ID NO: 1915) |
| 335 | SEQ ID NO: 31 (SEQ ID NO: 31) | GATACGGTTAGGCGGG (SEQ ID NO: 2116) |
| 336 | SEQ ID NO: 31 (SEQ ID NO: 31) | GATATGGTTAGGTGGG (SEQ ID NO: 2117) |
| 337 | SEQ ID NO: 31 (SEQ ID NO: 31) | TTCGGGCGTTTTATAT (SEQ ID NO: 2118) |
| 338 | SEQ ID NO: 31 (SEQ ID NO: 31) | GGTTTGGGTGTTTTATA (SEQ ID NO: 2119) |
| 339 | THH (SEQ ID NO: 32) | TTCGGAAGAAAAGCGAAT (SEQ ID NO: 1916) |
| 340 | THH (SEQ ID NO: 32) | TTTGGAAGAAAAGTGAAT (SEQ ID NO: 1917) |
| 341 | THH (SEQ ID NO: 32) | GTTCGTTGGCGTAAAT (SEQ ID NO: 1918) |
| 342 | THH (SEQ ID NO: 32) | GGTTTGTTGGTGTAAAT (SEQ ID NO: 1919) |
| 343 | THH (SEQ ID NO: 32) | AGTACGTGTATATCGG (SEQ ID NO: 1306) |
| 344 | THH (SEQ ID NO: 32) | TAGTATGTGTATATTGGAA (SEQ ID NO: 1307) |
| 345 | THH (SEQ ID NO: 32) | TATTCGGAAGTGATCGG (SEQ ID NO: 1920) |
| 346 | THH (SEQ ID NO: 32) | TATTTGGAAGTGATTGG (SEQ ID NO: 1921) |
| 347 | HOXB13 (SEQ ID NO: 34) | GTCGTTATTATTTCGAGG (SEQ ID NO: 2120) |
| 348 | HOXB13 (SEQ ID NO: 34) | GTTGTTATTATTTTGAGG (SEQ ID NO: 2121) |
| 349 | HOXB13 (SEQ ID NO: 34) | TTCGTAGAATCGAAGT (SEQ ID NO: 2220) |
| 350 | HOXB13 (SEQ ID NO: 34) | TAATTTGTAGAATTGAAGT (SEQ ID NO: 2221) |
| 351 | HOXB13 (SEQ ID NO: 34) | TTACGATTGAGCGTAT (SEQ ID NO: 2222) |
| 352 | HOXB13 (SEQ ID NO: 34) | TATGATTGAGTGTATAGG (SEQ ID NO: 2223) |
| 353 | HOXB13 (SEQ ID NO: 34) | AAGTTAGCGGGTTCGT (SEQ ID NO: 2122) |
| 354 | HOXB13 (SEQ ID NO: 34) | AAGTTAGTGGGTTTGT (SEQ ID NO: 2123) |
| 355 | HOXB13 (SEQ ID NO: 34) | TTGGTCGCGTAGTAAA (SEQ ID NO: 2124) |
| 356 | HOXB13 (SEQ ID NO: 34) | TGGTTGTGTAGTAAAGT (SEQ ID NO: 2125) |
| 357 | (SEQ ID NO: 35) | GGAGGTGCGAATTTAA (SEQ ID NO: 2126) |
| 358 | (SEQ ID NO: 35) | GGGAGGTGTGAATTTA (SEQ ID NO: 2127) |
| 359 | (SEQ ID NO: 35) | AAATAGTCGTTTGGGA (SEQ ID NO: 2128) |
| 360 | (SEQ ID NO: 35) | AAATAGTTGTTTGGGAG (SEQ ID NO: 2129) |
| 361 | (SEQ ID NO: 35) | AGAAAATATACGAGATTTAT (SEQ ID NO: 2130) |
| 362 | (SEQ ID NO: 35) | AGAAAATATATGAGATTTATT (SEQ ID NO: 2131) |
| 363 | (SEQ ID NO: 35) | TAAAGACGGGAAGAGA (SEQ ID NO: 2132) |
| 364 | (SEQ ID NO: 35) | ATAAAGATGGGAAGAGA (SEQ ID NO: 2133) |
| 365 | (SEQ ID NO: 36) | TTCGTTGGAGATCGTAA (SEQ ID NO: 2192) |
| 366 | (SEQ ID NO: 36) | GTTTGTTGGAGATTGTA (SEQ ID NO: 2193) |
| 367 | (SEQ ID NO: 36) | TTATTTGCGTTTCGAA (SEQ ID NO: 2218) |
| 368 | (SEQ ID NO: 36) | AATTATTTGTGTTTTGAAT (SEQ ID NO: 2219) |
| 369 | (SEQ ID NO: 36) | TTGTCGTGATAGCGTT (SEQ ID NO: 1308) |
| 370 | (SEQ ID NO: 36) | TTTGTTGTGATAGTGTT (SEQ ID NO: 1309) |
| 371 | (SEQ ID NO: 36) | GGACGTTGCGATTGTA (SEQ ID NO: 2194) |
| 372 | (SEQ ID NO: 36) | GATGTTGTGATTGTAGT (SEQ ID NO: 2195) |
| 373 | MGC10561 (SEQ ID NO: 37) | ATATTTAGCGTAGTTATTT (SEQ ID NO: 2204) |
| 374 | MGC10561 (SEQ ID NO: 37) | TAGTATATTTAGTGTAGTTAT (SEQ ID NO: 2205) |
| 375 | MGC10561 (SEQ ID NO: 37) | TTTTTTACGTTAAGGGG (SEQ ID NO: 2134) |
| 376 | MGC10561 (SEQ ID NO: 37) | TTTTTATGTTAAGGGGG (SEQ ID NO: 2135) |
| 377 | MGC10561 (SEQ ID NO: 37) | TTTGTTTTTCGAGTAGA (SEQ ID NO: 2136) |
| 378 | MGC10561 (SEQ ID NO: 37) | TGTTTTTTGAGTAGAGG (SEQ ID NO: 2137) |
| 379 | LMX1A (SEQ ID NO: 38) | GTCGGGTTTTTCGGAA (SEQ ID NO: 2138) |
| 380 | LMX1A (SEQ ID NO: 38) | GTTGGGTTTTTTGGAAG (SEQ ID NO: 2139) |
| 381 | LMX1A (SEQ ID NO: 38) | GTCGAGATTTTATCGAAA (SEQ ID NO: 2140) |
| 382 | LMX1A (SEQ ID NO: 38) | GTTGAGATTTTATTGAAAG (SEQ ID NO: 2141) |
| 383 | LMX1A (SEQ ID NO: 38) | TTCGTTTTTAACGTGG (SEQ ID NO: 2224) |
| 384 | LMX1A (SEQ ID NO: 38) | TTTGTTTTTAATGTGGTT (SEQ ID NO: 2225) |
| 385 | LMX1A (SEQ ID NO: 38) | AGTATTCGGGCGGGTA (SEQ ID NO: 2142) |
| 386 | LMX1A (SEQ ID NO: 38) | GTAGTATTTGGGTGGG (SEQ ID NO: 2143) |
| 387 | LMX1A (SEQ ID NO: 38) | AACGAAATTACGTGTAT (SEQ ID NO: 2144) |
| 388 | LMX1A (SEQ ID NO: 38) | TGAAATGAAATTATGTGTA (SEQ ID NO: 2145) |
| 389 | SENP3 (SEQ ID NO: 39) | TATTCGGATCGGGTTT (SEQ ID NO: 1922) |
| 390 | SENP3 (SEQ ID NO: 39) | TTTATTTGGATTGGGTT (SEQ ID NO: 1923) |
| 391 | SENP3 (SEQ ID NO: 39) | TAGTCGAAAGTAGGACGT (SEQ ID NO: 1924) |
| 392 | SENP3 (SEQ ID NO: 39) | TAGTTGAAAGTAGGATGT (SEQ ID NO: 1925) |
| 393 | SENP3 (SEQ ID NO: 39) | AGGACGTTTTTGATCGG (SEQ ID NO: 1926) |
| 394 | SENP3 (SEQ ID NO: 39) | AGGATGTTTTTGATTGG (SEQ ID NO: 1927) |
| 395 | SENP3 (SEQ ID NO: 39) | AGTTATCGTTAGGAGGG (SEQ ID NO: 1928) |
| 396 | SENP3 (SEQ ID NO: 39) | AGTTATTGTTAGGAGGG (SEQ ID NO: 1929) |
| 397 | GS1 (SEQ ID NO: 40) | GAAGCGACGTTTATTT (SEQ ID NO: 1310) |
| 398 | GS1 (SEQ ID NO: 40) | GGGAAGTGATGTTTATT (SEQ ID NO: 1311) |
| 399 | GS1 (SEQ ID NO: 40) | TGCGAGTTAGCGGTTA (SEQ ID NO: 2146) |
| 400 | GS1 (SEQ ID NO: 40) | TTGTGAGTTAGTGGTT (SEQ ID NO: 2147) |
| 401 | GS1 (SEQ ID NO: 40) | AATCGTTAGTTCGGTT (SEQ ID NO: 1312) |
| 402 | GS1 (SEQ ID NO: 40) | TGAATTGTTAGTTTGGT (SEQ ID NO: 1313) |
| 403 | GS1 (SEQ ID NO: 40) | TAGAGGTTCGAGCGTA (SEQ ID NO: 1314) |
| 404 | GS1 (SEQ ID NO: 40) | AGAGGTTTGAGTGTAG (SEQ ID NO: 1315) |
| 405 | GS1 (SEQ ID NO: 40) | AGTTTCGAGGTTTTCGG (SEQ ID NO: 2148) |
| 406 | GS1 (SEQ ID NO: 40) | AAGTTTTGAGGTTTTTGG (SEQ ID NO: 2149) |
| 407 | TITF1 (SEQ ID NO: 41) | GTCGTGGGGATCGTAT (SEQ ID NO: 2150) |
| 408 | TITF1 (SEQ ID NO: 41) | GTTGTGGGGATTGTAT (SEQ ID NO: 2151) |
| 409 | TITF1 (SEQ ID NO: 41) | TTTTTGCGTAAACGTA (SEQ ID NO: 1316) |
| 410 | TITF1 (SEQ ID NO: 41) | TTGTGTAAATGTAGGGT (SEQ ID NO: 1317) |
| 411 | TITF1 (SEQ ID NO: 41) | GGTTCGTTTAAGTTCGG (SEQ ID NO: 2152) |
| 412 | TITF1 (SEQ ID NO: 41) | GGTTTGTTTAAGTTTGG (SEQ ID NO: 2153) |
| 413 | TITF1 (SEQ ID NO: 41) | TTAGGTCGCGTTTGTA (SEQ ID NO: 2154) |
| 414 | TITF1 (SEQ ID NO: 41) | AGGTTGTGTTTGTAGA (SEQ ID NO: 2155) |
| 415 | TITF1 (SEQ ID NO: 41) | TATTTCGTTTTCGTAATT (SEQ ID NO: 2156) |
| 416 | TITF1 (SEQ ID NO: 41) | TTTGTTTTTGTAATTAGATT (SEQ ID NO: 2157) |
| 417 | SEQ ID NO: 42 (SEQ ID NO: 42) | AGGTCGAATAAAGCGT (SEQ ID NO: 2212) |
| 418 | SEQ ID NO: 42 (SEQ ID NO: 42) | GAGGTTGAATAAAGTGT (SEQ ID NO: 2213) |
| 419 | SEQ ID NO: 42 (SEQ ID NO: 42) | TTCGGAAGTTTAACGAGG (SEQ ID NO: 1318) |
| 420 | SEQ ID NO: 42 (SEQ ID NO: 42) | TTTGGAAGTTTAATGAGG (SEQ ID NO: 1319) |
| 421 | SEQ ID NO: 42 (SEQ ID NO: 42) | GAGTCGGGTTGCGATG (SEQ ID NO: 1930) |
| 422 | SEQ ID NO: 42 (SEQ ID NO: 42) | GGAGTTGGGTTGTGAT (SEQ ID NO: 1931) |
| 423 | SEQ ID NO: 42 (SEQ ID NO: 42) | ATGGGTTGCGATTTTTA (SEQ ID NO: 1932) |
| 424 | SEQ ID NO: 42 (SEQ ID NO: 42) | ATGGGTTGTGATTTTTA (SEQ ID NO: 1933) |
| 425 | DDX51 (SEQ ID NO: 43) | TAGGCGAGCGTTAGGT (SEQ ID NO: 2206) |
| 426 | DDX51 (SEQ ID NO: 43) | GGTGAGTGTTAGGTTA (SEQ ID NO: 2207) |
| 427 | DDX51 (SEQ ID NO: 43) | AGATTTTCGGCGAGAT (SEQ ID NO: 2158) |
| 428 | DDX51 (SEQ ID NO: 43) | ATTTTTGGTGAGATAGG (SEQ ID NO: 2159) |
| 429 | DDX51 (SEQ ID NO: 43) | TACGTGTGGTTTTCGGTA (SEQ ID NO: 2160) |
| 430 | DDX51 (SEQ ID NO: 43) | TATGTGTGGTTTTGGTA (SEQ ID NO: 2161) |
| 431 | DDX51 (SEQ ID NO: 43) | TGCGTTTATCGTTTTAG (SEQ ID NO: 1320) |
| 432 | DDX51 (SEQ ID NO: 43) | TGTGTTTATTGTTTTAGG (SEQ ID NO: 1321) |
| 433 | DDX51 (SEQ ID NO: 43) | AACGTGCGGGGTTTTT (SEQ ID NO: 2162) |
| 434 | DDX51 (SEQ ID NO: 43) | TGAATGTGTGGGGTTT (SEQ ID NO: 2163) |
| 435 | (SEQ ID NO: 117) | TAGCGGTTTTTTAGCGTA (SEQ ID NO: 1934) |
| 436 | (SEQ ID NO: 117) | AGTGGTTTTTTAGTGTAT (SEQ ID NO: 1935) |
| 437 | (SEQ ID NO: 117) | AGATGCGCGGGTAGAT (SEQ ID NO: 1936) |
| 438 | (SEQ ID NO: 117) | AGATGTGTGGGTAGAT (SEQ ID NO: 1937) |
| 439 | (SEQ ID NO: 117) | AGATAGTTCGTATTCGT (SEQ ID NO: 1938) |
| 440 | (SEQ ID NO: 117) | GTAGATAGTTTGTATTTGT (SEQ ID NO: 1939) |
| 441 | (SEQ ID NO: 117) | TTTGTTCGTAACGTTT (SEQ ID NO: 1940) |
| 442 | (SEQ ID NO: 117) | TGTTTGTAATGTTTAGAG (SEQ ID NO: 1941) |
| 443 | Q8NAN2 (SEQ ID NO: 44) | AGTTTCGCGAGGGGTT (SEQ ID NO: 1322) |
| 444 | Q8NAN2 (SEQ ID NO: 44) | AGAGTTTTGTGAGGGG (SEQ ID NO: 1323) |
| 445 | Q8NAN2 (SEQ ID NO: 44) | TTTTTACGTTAGAGGGA (SEQ ID NO: 1324) |
| 446 | Q8NAN2 (SEQ ID NO: 44) | TTTTTATGTTAGAGGGAG (SEQ ID NO: 1325) |
| 447 | SEQ ID NO: 45 (SEQ ID NO: 45) | AGCGAACGTTTATTTT (SEQ ID NO: 2164) |
| 448 | SEQ ID NO: 45 (SEQ ID NO: 45) | TAGGAGAGTGAATGTTT (SEQ ID NO: 2165) |
| 449 | SEQ ID NO: 45 (SEQ ID NO: 45) | TAATGTCGATCGGATT (SEQ ID NO: 1326) |
| 450 | SEQ ID NO: 45 (SEQ ID NO: 45) | ATGTTGATTGGATTTGT (SEQ ID NO: 1327) |
| 451 | SEQ ID NO: 45 (SEQ ID NO: 45) | TGTAGTATCGGGGGAG (SEQ ID NO: 2208) |
| 452 | SEQ ID NO: 45 (SEQ ID NO: 45) | TGTAGTATTGGGGGAG (SEQ ID NO: 2209) |
| 453 | SEQ ID NO: 45 (SEQ ID NO: 45) | TTTTTTACGGGCGATA (SEQ ID NO: 1328) |
| 454 | SEQ ID NO: 45 (SEQ ID NO: 45) | TTTTATGGGTGATAGGT (SEQ ID NO: 1329) |
| 455 | SEQ ID NO: 46 (SEQ ID NO: 46) | GAGTCGGGTTATCGTT (SEQ ID NO: 2166) |
| 456 | SEQ ID NO: 46 (SEQ ID NO: 46) | GGAGTTGGGTTATTGT (SEQ ID NO: 2167) |
| 457 | SEQ ID NO: 46 (SEQ ID NO: 46) | TTACGGATGTTTCGGT (SEQ ID NO: 2168) |
| 458 | SEQ ID NO: 46 (SEQ ID NO: 46) | TTTATGGATGTTTTGGT (SEQ ID NO: 2169) |
| 459 | SEQ ID NO: 46 (SEQ ID NO: 46) | TGACGTATTTTCGGTT (SEQ ID NO: 2170) |
| 460 | SEQ ID NO: 46 (SEQ ID NO: 46) | GGTGATGTATTTTTGGT (SEQ ID NO: 2171) |
| 461 | SEQ ID NO: 46 (SEQ ID NO: 46) | ATAGTCGGAATCGTTG (SEQ ID NO: 2172) |
| 462 | SEQ ID NO: 46 (SEQ ID NO: 46) | TAGTTGGAATTGTTGTT (SEQ ID NO: 2173) |
| 463 | O60279 (SEQ ID NO: 47) | AGTAAACGAATAAGAAGT (SEQ ID NO: 1942) |
| 464 | O60279 (SEQ ID NO: 47) | AAGTAAATGAATAAGAAGT (SEQ ID NO: 1943) |
| 465 | O60279 (SEQ ID NO: 47) | TACGTTTTTTCGGATTA (SEQ ID NO: 1944) |
| 466 | O60279 (SEQ ID NO: 47) | TATGTTTTTTTGGATTAAG (SEQ ID NO: 1945) |
| 467 | O60279 (SEQ ID NO: 47) | TAATTATCGGCGGTGT (SEQ ID NO: 1946) |
| 468 | O60279 (SEQ ID NO: 47) | ATTATTGGTGGTGTTTT (SEQ ID NO: 1947) |
| 469 | O60279 (SEQ ID NO: 47) | GGACGGCGGAAAATTA (SEQ ID NO: 1948) |
| 470 | O60279 (SEQ ID NO: 47) | AGGGATGGTGGAAAAT (SEQ ID NO: 1949) |
| 471 | SEQ ID NO: 48 (SEQ ID NO: 48) | TATTTGGCGATTCGGA (SEQ ID NO: 1950) |
| 472 | SEQ ID NO: 48 (SEQ ID NO: 48) | TGGTGATTTGGAGATT (SEQ ID NO: 1951) |
| 473 | SEQ ID NO: 48 (SEQ ID NO: 48) | TAGGGTTACGTGTCGG (SEQ ID NO: 1952) |
| 474 | SEQ ID NO: 48 (SEQ ID NO: 48) | TAGGGTTATGTGTTGG (SEQ ID NO: 1953) |
| 475 | SEQ ID NO: 48 (SEQ ID NO: 48) | AACGAATTTTTCGATATT (SEQ ID NO: 1954) |
| 476 | SEQ ID NO: 48 (SEQ ID NO: 48) | TTTAATGAATTTTTTGATATT (SEQ ID NO: 1955) |
| 477 | SEQ ID NO: 48 (SEQ ID NO: 48) | AAAATCGTATGCGTGT (SEQ ID NO: 1956) |
| 478 | SEQ ID NO: 48 (SEQ ID NO: 48) | GAAAATTGTATGTGTGTG (SEQ ID NO: 1957) |
| 479 | SEQ ID NO: 9 (SEQ ID NO: 9) | AGGTATTTCGCGATAT (SEQ ID NO: 1330) |
| 480 | SEQ ID NO: 9 (SEQ ID NO: 9) | AGGTATTTTGTGATATTTT (SEQ ID NO: 1331) |
| 481 | SEQ ID NO: 9 (SEQ ID NO: 9) | GTTTTTCGATTTACGTT (SEQ ID NO: 1332) |
| 482 | SEQ ID NO: 9 (SEQ ID NO: 9) | TAGGTTTTTTGATTTATGT (SEQ ID NO: 1333) |
| 483 | SEQ ID NO: 9 (SEQ ID NO: 9) | TTACGGTTCGGTTATT (SEQ ID NO: 1334) |
| 484 | SEQ ID NO: 9 (SEQ ID NO: 9) | AGGTTTTATGGTTTGGT (SEQ ID NO: 1335) |
| 485 | SEQ ID NO: 9 (SEQ ID NO: 9) | GTTTCGCGTTTAGGGA (SEQ ID NO: 1958) |
| 486 | SEQ ID NO: 9 (SEQ ID NO: 9) | GTTTTGTGTTTAGGGAT (SEQ ID NO: 1959) |
| 487 | SEQ ID NO: 9 (SEQ ID NO: 9) | AGTGTTCGTCGTAGTT (SEQ ID NO: 1960) |
| 488 | SEQ ID NO: 9 (SEQ ID NO: 9) | TGAGTGTTTGTTGTAGT (SEQ ID NO: 1961) |
| 489 | SEQ ID NO: 2 (SEQ ID NO: 2) | ATTGGGTTTCGCGTAGG (SEQ ID NO: 2174) |
| 490 | SEQ ID NO: 2 (SEQ ID NO: 2) | ATTGGGTTTTGTGTAGG (SEQ ID NO: 2175) |
| 491 | SEQ ID NO: 2 (SEQ ID NO: 2) | TAGTAGTCGGCGGGAG (SEQ ID NO: 2176) |
| 492 | SEQ ID NO: 2 (SEQ ID NO: 2) | TAGTAGTTGGTGGGAG (SEQ ID NO: 2177) |
| 493 | SEQ ID NO: 2 (SEQ ID NO: 2) | TGTCGTACGTTATGTT (SEQ ID NO: 2226) |
| 494 | SEQ ID NO: 2 (SEQ ID NO: 2) | GGTGTTGTATGTTATGT (SEQ ID NO: 2227) |
| 495 | SEQ ID NO: 2 (SEQ ID NO: 2) | TTGATTGGCGGACGAG (SEQ ID NO: 1699) |
| 496 | SEQ ID NO: 2 (SEQ ID NO: 2) | TTGATTGGTGGATGAG (SEQ ID NO: 1700) |
| 497 | SEQ ID NO: 3 (SEQ ID NO: 3) | TTGCGTTAATTCGGTA (SEQ ID NO: 2178) |
| 498 | SEQ ID NO: 3 (SEQ ID NO: 3) | AATTTGTGTTAATTTGGT (SEQ ID NO: 2179) |
| 499 | SEQ ID NO: 3 (SEQ ID NO: 3) | AGTCGGGGAGAGCGAAA (SEQ ID NO: 2180) |
| 500 | SEQ ID NO: 3 (SEQ ID NO: 3) | AGTTGGGAGAGTGAAA (SEQ ID NO: 2181) |
| 501 | SEQ ID NO: 3 (SEQ ID NO: 3) | GGTCGAAGAGTCGGGA (SEQ ID NO: 2182) |
| 502 | SEQ ID NO: 3 (SEQ ID NO: 3) | GGTTGAAGAGTTGGGA (SEQ ID NO: 2183) |
| 503 | SEQ ID NO: 3 (SEQ ID NO: 3) | ATGTTAGCGGGTCGAA (SEQ ID NO: 2184) |
| 504 | SEQ ID NO: 3 (SEQ ID NO: 3) | ATGTTAGTGGGTTGAA (SEQ ID NO: 2185) |
| 505 | SEQ ID NO: 4 (SEQ ID NO: 4) | TTTTGTTCGCGTTGAA (SEQ ID NO: 1962) |
| 506 | SEQ ID NO: 4 (SEQ ID NO: 4) | TTGTTTGTGTTGAAGTA (SEQ ID NO: 1963) |
| 507 | SEQ ID NO: 4 (SEQ ID NO: 4) | GGGTCGCGAGGTAGTT (SEQ ID NO: 1964) |
| 508 | SEQ ID NO: 4 (SEQ ID NO: 4) | TGGGTTGTGAGGTAGT (SEQ ID NO: 1965) |
| 509 | SEQ ID NO: 4 (SEQ ID NO: 4) | TTTGTGCGACGTTATT (SEQ ID NO: 1966) |
| 510 | SEQ ID NO: 4 (SEQ ID NO: 4) | GGTTTGTGTGATGTTAT (SEQ ID NO: 1967) |
| 511 | SEQ ID NO: 4 (SEQ ID NO: 4) | ATGGCGGTTTCGATTT (SEQ ID NO: 1968) |
| 512 | SEQ ID NO: 4 (SEQ ID NO: 4) | GATGGTGGTTTTGATTT (SEQ ID NO: 1969) |
| 513 | HS3ST2 (SEQ ID NO: 113) | GAATCGGAGAGGCGAG (SEQ ID NO: 1664) |
| 514 | HS3ST2 (SEQ ID NO: 113) | AATTGGAGAGGTGAGG (SEQ ID NO: 1665) |
| 515 | HS3ST2 (SEQ ID NO: 113) | GGGTAATCGTTTGGTA (SEQ ID NO: 1666) |
| 516 | HS3ST2 (SEQ ID NO: 113) | GGGTAATTGTTTGGTAT (SEQ ID NO: 1667) |
| 517 | PRDM2 (SEQ ID NO: 114) | TGTAGAGACGACGATT (SEQ ID NO: 1668) |
| 518 | PRDM2 (SEQ ID NO: 114) | ATTGTAGAGATGATGATT (SEQ ID NO: 1669) |
| 519 | PRDM2 (SEQ ID NO: 114) | AGAGCGCGGTAGTAGT (SEQ ID NO: 1670) |
| 520 | PRDM2 (SEQ ID NO: 114) | TGAGAGTGTGGTAGTA (SEQ ID NO: 1671) |
| 521 | PRDM2 (SEQ ID NO: 114) | TGTTCGCGATGTTTTA (SEQ ID NO: 1672) |
| 522 | PRDM2 (SEQ ID NO: 114) | TGTTTGTGATGTTTTAGT (SEQ ID NO: 1673) |
| 523 | PRDM2 (SEQ ID NO: 114) | AGTATATAAACGTAGATTTT (SEQ ID NO: 1674) |
| 524 | PRDM2 (SEQ ID NO: 114) | AAGTATATAAATGTAGATTTT (SEQ ID NO: 1675) |
| 525 | ALX4 (SEQ ID NO: 64) | AAGTCGATCGTTTTGT (SEQ ID NO: 1676) |
| 526 | ALX4 (SEQ ID NO: 64) | TGGAAGTTGATTGTTTT (SEQ ID NO: 1677) |
| 527 | ALX4 (SEQ ID NO: 64) | ATATCGTTCGGGGGAA (SEQ ID NO: 1827) |
| 528 | ALX4 (SEQ ID NO: 64) | ATTGTTTGGGGGAATT (SEQ ID NO: 1336) |
| 529 | ALX4 (SEQ ID NO: 64) | TATTGCGAGGATTCGG (SEQ ID NO: 1678) |
| 530 | ALX4 (SEQ ID NO: 64) | ATTGTGAGGATTTGGT (SEQ ID NO: 1679) |
| 531 | ALX4 (SEQ ID NO: 64) | TTCGTAGCGTAGGGTT (SEQ ID NO: 1680) |
| 532 | ALX4 (SEQ ID NO: 64) | TTTGTAGTGTAGGGTTT (SEQ ID NO: 1681) |
| 533 | LEF1 (SEQ ID NO: 63) | TGAGATTTCGTTTATTGA (SEQ ID NO: 1337) |
| 534 | LEF1 (SEQ ID NO: 63) | ATTGAGATTTTGTTTATTG (SEQ ID NO: 1338) |
| 535 | LEF1 (SEQ ID NO: 63) | TTGTTTTTAACGAAATTAT (SEQ ID NO: 1339) |
| 536 | LEF1 (SEQ ID NO: 63) | TGTTTTTAATGAAATTATTTA (SEQ ID NO: 1340) |
| 537 | LEF1 (SEQ ID NO: 63) | TTGGAAGTCGAAGAGA (SEQ ID NO: 1341) |
| 538 | LEF1 (SEQ ID NO: 63) | TTTGGAAGTTGAAGAGA (SEQ ID NO: 1342) |
| 539 | LEF1 (SEQ ID NO: 63) | TGGATTTTTCGAGTAATT (SEQ ID NO: 1343) |
| 540 | LEF1 (SEQ ID NO: 63) | TTGGATTTTTTGAGTAATT (SEQ ID NO: 1344) |
| 541 | SCGB3A1 (SEQ ID NO: 115) | GATAGACGAGTGAGGA (SEQ ID NO: 1345) |
| 542 | SCGB3A1 (SEQ ID NO: 115) | GATAGATGAGTGAGGAT (SEQ ID NO: 1346) |
| 543 | SCGB3A1 (SEQ ID NO: 115) | TATTGGCGTCGAGGTT (SEQ ID NO: 1828) |
| 544 | SCGB3A1 (SEQ ID NO: 115) | TATTGGTGTTGAGGTT (SEQ ID NO: 1829) |
| 545 | SCGB3A1 (SEQ ID NO: 115) | GGCGTAGAAGGCGTTT (SEQ ID NO: 1823) |
| 546 | SCGB3A1 (SEQ ID NO: 115) | GGTGTAGAAGGTGTTT (SEQ ID NO: 1824) |
| 547 | SCGB3A1 (SEQ ID NO: 115) | TAGTGTTCGACGTTGT (SEQ ID NO: 1468) |
| 548 | SCGB3A1 (SEQ ID NO: 115) | TAGTGTTTGATGTTGTT (SEQ ID NO: 1469) |
| 549 | SASH1 (SEQ ID NO: 102) | TAGATTCGAGGTGCGG (SEQ ID NO: 1470) |
| 550 | SASH1 (SEQ ID NO: 102) | TAGATTTGAGGTGTGG (SEQ ID NO: 1471) |
| 551 | SASH1 (SEQ ID NO: 102) | ATTCGGTATTCGGGTAG (SEQ ID NO: 1472) |
| 552 | SASH1 (SEQ ID NO: 102) | ATTTGGTATTTGGGTAG (SEQ ID NO: 1473) |
| 553 | SASH1 (SEQ ID NO: 102) | ATTGGGACGTACGGTT (SEQ ID NO: 1785) |
| 554 | SASH1 (SEQ ID NO: 102) | GATTGGGATGTATGGT (SEQ ID NO: 1786) |
| 555 | SASH1 (SEQ ID NO: 102) | AGTCGGAATCGGAGTT (SEQ ID NO: 1474) |
| 556 | SASH1 (SEQ ID NO: 102) | GTTGGAATTGGAGTTTA (SEQ ID NO: 1475) |
| 557 | S100A7 (SEQ ID NO: 96) | TATAGTCGGGGTGATA (SEQ ID NO: 1682) |
| 558 | S100A7 (SEQ ID NO: 96) | TTTATAGTTGGGGTGAT (SEQ ID NO: 1683) |
| 559 | S100A7 (SEQ ID NO: 96) | AGTCGGGCGTTAGTAA (SEQ ID NO: 1684) |
| 560 | S100A7 (SEQ ID NO: 96) | GAGTTGGGTGTTAGTA (SEQ ID NO: 1685) |
| 561 | S100A7 (SEQ ID NO: 96) | GGATGGCGGAAGTTTA (SEQ ID NO: 1686) |
| 562 | S100A7 (SEQ ID NO: 96) | GGATGGTGGAAGTTTA (SEQ ID NO: 1687) |
| 563 | APC (SEQ ID NO: 65) | GATTCGTATTTCGTAGT (SEQ ID NO: 1688) |
| 564 | APC (SEQ ID NO: 65) | TTTGTATTTTGTAGTGGG (SEQ ID NO: 1347) |
| 565 | APC (SEQ ID NO: 65) | AGCGTTTTGGTTCGTAT (SEQ ID NO: 1689) |
| 566 | APC (SEQ ID NO: 65) | AGTGTTTTGGTTTGTAT (SEQ ID NO: 1690) |
| 567 | APC (SEQ ID NO: 65) | TTAATCGGCGGGTTTT (SEQ ID NO: 1691) |
| 568 | APC (SEQ ID NO: 65) | AGTTAATTGGTGGGTT (SEQ ID NO: 1692) |
| 569 | APC (SEQ ID NO: 65) | ATTTTCGAGTTCGGTA (SEQ ID NO: 1693) |
| 570 | APC (SEQ ID NO: 65) | TTTTTGAGTTTGGTAGT (SEQ ID NO: 1694) |
| 571 | ARH1/NOEY2 (SEQ ID NO: 97) | TGTTATCGTTAACGATT (SEQ ID NO: 1476) |
| 572 | ARH1/NOEY2 (SEQ ID NO: 97) | AGGTGTTATTGTTAATGA (SEQ ID NO: 1477) |
| 573 | ARH1/NOEY2 (SEQ ID NO: 97) | TAAAACGTTCGGTAGG (SEQ ID NO: 1478) |
| 574 | ARH1/NOEY2 (SEQ ID NO: 97) | TTTAAAATGTTTGGTAGG (SEQ ID NO: 1479) |
| 575 | ARH1/NOEY2 (SEQ ID NO: 97) | TGTATTCGTCGTTAGG (SEQ ID NO: 1480) |
| 576 | ARH1/NOEY2 (SEQ ID NO: 97) | AATGTATTTGTTGTTAGG (SEQ ID NO: 1481) |
| 577 | ARH1/NOEY2 (SEQ ID NO: 97) | TTAGACGGAGTTCGGA (SEQ ID NO: 1482) |
| 578 | ARH1/NOEY2 (SEQ ID NO: 97) | TAGATGGAGTTTGGAGA (SEQ ID NO: 1483) |
| 579 | ARH1/NOEY2 (SEQ ID NO: 97) | TAGACGTAGGCGTATT (SEQ ID NO: 1484) |
| 580 | ARH1/NOEY2 (SEQ ID NO: 97) | GGGTAGATGTAGGTGT (SEQ ID NO: 1485) |
| 581 | BRCA2 (SEQ ID NO: 56) | AGTATACGTATTATTCGG (SEQ ID NO: 1348) |
| 582 | BRCA2 (SEQ ID NO: 56) | AGTATATGTATTATTTGGAA (SEQ ID NO: 1349) |
| 583 | BRCA2 (SEQ ID NO: 56) | TAGAAGTTCGCGTTAT (SEQ ID NO: 1350) |
| 584 | BRCA2 (SEQ ID NO: 56) | GAAGTTTGTGTTATAAGT (SEQ ID NO: 1351) |
| 585 | BRCA2 (SEQ ID NO: 56) | TATCGTCGTAAAAGATAT (SEQ ID NO: 1352) |
| 586 | BRCA2 (SEQ ID NO: 56) | GATTTATTGTTGTAAAAGAT (SEQ ID NO: 1353) |
| 587 | BRCA2 (SEQ ID NO: 56) | ATTCGTTTTAGAGGCGTA (SEQ ID NO: 1695) |
| 588 | BRCA2 (SEQ ID NO: 56) | ATTTGTTTTAGAGGTGTA (SEQ ID NO: 1696) |
| 589 | BRCA2 (SEQ ID NO: 56) | TTTCGTTACGTTGGAT (SEQ ID NO: 1354) |
| 590 | BRCA2 (SEQ ID NO: 56) | TTTTTGTTATGTTGGATT (SEQ ID NO: 1355) |
| 591 | CDH1 (SEQ ID NO: 79) | TATAGACGCGGTGATT (SEQ ID NO: 1356) |
| 592 | CDH1 (SEQ ID NO: 79) | TATAGATGTGGTGATTTT (SEQ ID NO: 1357) |
| 593 | CDH1 (SEQ ID NO: 79) | TTGACGGTTCGTTTAT (SEQ ID NO: 1358) |
| 594 | CDH1 (SEQ ID NO: 79) | GGAGTTGATGGTTTGT (SEQ ID NO: 1359) |
| 595 | CDH1 (SEQ ID NO: 79) | ATTAGTAGCGCGGATT (SEQ ID NO: 1360) |
| 596 | CDH1 (SEQ ID NO: 79) | AATTAGTAGTGTGGATTT (SEQ ID NO: 1361) |
| 597 | CDH1 (SEQ ID NO: 79) | AGGTATCGTTTTTCGT (SEQ ID NO: 1832) |
| 598 | CDH1 (SEQ ID NO: 79) | GAGGTATTGTTTTTTGTA (SEQ ID NO: 1833) |
| 599 | CDH1 (SEQ ID NO: 79) | TTCGGAGGTATCGTTT (SEQ ID NO: 1362) |
| 600 | CDH1 (SEQ ID NO: 79) | TTTTGGAGGTATTGTTT (SEQ ID NO: 1363) |
| 601 | CDKN1A (SEQ ID NO: 67) | AGCGTATTAACGTAGG (SEQ ID NO: 1364) |
| 602 | CDKN1A (SEQ ID NO: 67) | TTTAGTGTATTAATGTAGG (SEQ ID NO: 1365) |
| 603 | CDKN1A (SEQ ID NO: 67) | TGTAGTACGCGAGGTT (SEQ ID NO: 1366) |
| 604 | CDKN1A (SEQ ID NO: 67) | TGTAGTATGTGAGGTTT (SEQ ID NO: 1367) |
| 605 | CDKN1A (SEQ ID NO: 67) | ATTAGGGTCGCGTTGA (SEQ ID NO: 1494) |
| 606 | CDKN1A (SEQ ID NO: 67) | ATTAGGGTTGTGTTGA (SEQ ID NO: 1495) |
| 607 | CDKN1A (SEQ ID NO: 67) | TTCGTCGAGGTATCGA (SEQ ID NO: 1368) |
| 608 | CDKN1A (SEQ ID NO: 67) | TTTGTTGAGGTATTGAG (SEQ ID NO: 1369) |
| 609 | DAPK1 (SEQ ID NO: 98) | ATAGATCGTTTAGCGT (SEQ ID NO: 1370) |
| 610 | DAPK1 (SEQ ID NO: 98) | ATTGTTTAGTGTTTGGG (SEQ ID NO: 1371) |
| 611 | DAPK1 (SEQ ID NO: 98) | TTTTATTTCGCGAGGA (SEQ ID NO: 1372) |
| 612 | DAPK1 (SEQ ID NO: 98) | TATTTTGTGAGGAGGG (SEQ ID NO: 1373) |
| 613 | DAPK1 (SEQ ID NO: 98) | TTTCGGAGATTCGGTT (SEQ ID NO: 1502) |
| 614 | DAPK1 (SEQ ID NO: 98) | TTTGGAGATTTGGTTTT (SEQ ID NO: 1503) |
| 615 | DAPK1 (SEQ ID NO: 98) | TTTTAGCGTCGGGGAG (SEQ ID NO: 1504) |
| 616 | DAPK1 (SEQ ID NO: 98) | TTTTAGTGTTGGGGAG (SEQ ID NO: 1505) |
| 617 | SEQ ID NO: 2 (SEQ ID NO: 2) | TAGGGGTTCGATTAGG (SEQ ID NO: 1834) |
| 618 | SEQ ID NO: 2 (SEQ ID NO: 2) | AGGGGTTTGATTAGGG (SEQ ID NO: 1835) |
| 619 | SEQ ID NO: 2 (SEQ ID NO: 2) | TTGAATTGCGGTTAGA (SEQ ID NO: 1803) |
| 620 | SEQ ID NO: 2 (SEQ ID NO: 2) | TTGAATTGTGGTTAGAG (SEQ ID NO: 1804) |
| 621 | SEQ ID NO: 2 (SEQ ID NO: 2) | TAGGTATACGAAAGAGTA (SEQ ID NO: 1697) |
| 622 | SEQ ID NO: 2 (SEQ ID NO: 2) | TTAGGTATATGAAAGAGTA (SEQ ID NO: 1698) |
| 623 | SEQ ID NO: 2 (SEQ ID NO: 2) | TGTCGTACGTTATGTT (SEQ ID NO: 2226) |
| 624 | SEQ ID NO: 2 (SEQ ID NO: 2) | GGTGTTGTATGTTATGT (SEQ ID NO: 2227) |
| 625 | SEQ ID NO: 2 (SEQ ID NO: 2) | TTGATTGGCGGACGAG (SEQ ID NO: 1699) |
| 626 | SEQ ID NO: 2 (SEQ ID NO: 2) | TTGATTGGTGGATGAG (SEQ ID NO: 1700) |
| 627 | EYA4 (SEQ ID NO: 58) | GGTATAAAATCGTAAATTTT (SEQ ID NO: 1506) |
| 628 | EYA4 (SEQ ID NO: 58) | GGGTATAAAATTGTAAATTT (SEQ ID NO: 1507) |
| 629 | EYA4 (SEQ ID NO: 58) | TATGTAGTCGCGTAGT (SEQ ID NO: 1508) |
| 630 | EYA4 (SEQ ID NO: 58) | TTTATGTAGTTGTGTAGT (SEQ ID NO: 1509) |
| 631 | EYA4 (SEQ ID NO: 58) | GTTTAGATACGAAATGTT (SEQ ID NO: 1510) |
| 632 | EYA4 (SEQ ID NO: 58) | GTTTAGATATGAAATGTTAT (SEQ ID NO: 1511) |
| 633 | EYA4 (SEQ ID NO: 58) | AGTTTTGACGTCGTTT (SEQ ID NO: 1512) |
| 634 | EYA4 (SEQ ID NO: 58) | TTGATGTTGTTTTGGAA (SEQ ID NO: 1513) |
| 635 | FHIT (SEQ ID NO: 76) | TTTTCGTTTTACGAGG (SEQ ID NO: 1374) |
| 636 | FHIT (SEQ ID NO: 76) | TTTTGTTTTATGAGGGT (SEQ ID NO: 1375) |
| 637 | FHIT (SEQ ID NO: 76) | TTTAAGTATCGATTTTAGT (SEQ ID NO: 1787) |
| 638 | FHIT (SEQ ID NO: 76) | TAAGTATTGATTTTAGTTTTA (SEQ ID NO: 1788) |
| 639 | FHIT (SEQ ID NO: 76) | GTTACGTTAGCGGGTT (SEQ ID NO: 1514) |
| 640 | FHIT (SEQ ID NO: 76) | GGTTATGTTAGTGGGT (SEQ ID NO: 1515) |
| 641 | FHIT (SEQ ID NO: 76) | TTCGGGGACGTTATAG (SEQ ID NO: 1516) |
| 642 | FHIT (SEQ ID NO: 76) | GGTTTGGGGATGTTAT (SEQ ID NO: 1517) |
| 643 | GSTP1 (SEQ ID NO: 59) | GGCGATTTCGGGGATT (SEQ ID NO: 1518) |
| 644 | GSTP1 (SEQ ID NO: 59) | GGTGATTTTGGGGATTT (SEQ ID NO: 1519) |
| 645 | GSTP1 (SEQ ID NO: 59) | GACGTTCGGGGTGTAG (SEQ ID NO: 1520) |
| 646 | GSTP1 (SEQ ID NO: 59) | GATGTTTGGGGTGTAG (SEQ ID NO: 1521) |
| 647 | GSTP1 (SEQ ID NO: 59) | AGTTCGCGGGATTTTT (SEQ ID NO: 1522) |
| 648 | GSTP1 (SEQ ID NO: 59) | GGAGTTTGTGGGATTT (SEQ ID NO: 1523) |
| 649 | GSTP1 (SEQ ID NO: 59) | AGTTTTCGTTATTAGTGA (SEQ ID NO: 1524) |
| 650 | GSTP1 (SEQ ID NO: 59) | TAGTTTTTGTTATTAGTGA (SEQ ID NO: 1525) |
| 651 | HIC1 (SEQ ID NO: 85) | TTTTGTCGTACGGAAT (SEQ ID NO: 1376) |
| 652 | HIC1 (SEQ ID NO: 85) | AGTTTTTGTTGTATGGA (SEQ ID NO: 1377) |
| 653 | HIC1 (SEQ ID NO: 85) | TATCGAAGTTTTCGGG (SEQ ID NO: 1526) |
| 654 | HIC1 (SEQ ID NO: 85) | TATTGAAGTTTTTGGGT (SEQ ID NO: 1527) |
| 655 | HIC1 (SEQ ID NO: 85) | TAGCGGTTATTTCGGT (SEQ ID NO: 1528) |
| 656 | HIC1 (SEQ ID NO: 85) | TTTAGTGGTTATTTTGGT (SEQ ID NO: 1529) |
| 657 | HIC1 (SEQ ID NO: 85) | TACGTTTTTCGTAGCGT (SEQ ID NO: 1530) |
| 658 | HIC1 (SEQ ID NO: 85) | ATTATGTTTTTTGTAGTGT (SEQ ID NO: 1531) |
| 659 | HIC1 (SEQ ID NO: 85) | TTCGGTTTTGTCGTATA (SEQ ID NO: 1532) |
| 660 | HIC1 (SEQ ID NO: 85) | TTTGGTTTTGTTGTATAG (SEQ ID NO: 1533) |
| 661 | IGFBP7 (SEQ ID NO: 94) | TAGTCGCGGAATGTTA (SEQ ID NO: 1701) |
| 662 | IGFBP7 (SEQ ID NO: 94) | TTGGTAGTTGTGGAAT (SEQ ID NO: 1702) |
| 663 | IGFBP7 (SEQ ID NO: 94) | ATTTTTTCGCGGGTAT (SEQ ID NO: 1703) |
| 664 | IGFBP7 (SEQ ID NO: 94) | TTTTTGTGGGTATTTTAG (SEQ ID NO: 1704) |
| 665 | IGFBP7 (SEQ ID NO: 94) | GGTATATTCGACGGGG (SEQ ID NO: 1705) |
| 666 | IGFBP7 (SEQ ID NO: 94) | GGGTATATTTGATGGGG (SEQ ID NO: 1706) |
| 667 | IGFBP7 (SEQ ID NO: 94) | GGTACGAGCGTTTTTT (SEQ ID NO: 1707) |
| 668 | IGFBP7 (SEQ ID NO: 94) | TGGGTATGAGTGTTTT (SEQ ID NO: 1708) |
| 669 | IGFBP7 (SEQ ID NO: 94) | AAAGCGTATTTAATTCGT (SEQ ID NO: 1709) |
| 670 | IGFBP7 (SEQ ID NO: 94) | AGTGTATTTAATTTGTGTT (SEQ ID NO: 1710) |
| 671 | MLH1 (SEQ ID NO: 89) | AAGTCGTTTTGACGTA (SEQ ID NO: 1378) |
| 672 | MLH1 (SEQ ID NO: 89) | TAAGTTGTTTTGATGTAG (SEQ ID NO: 1379) |
| 673 | MLH1 (SEQ ID NO: 89) | AGGCGGCGATAGATTA (SEQ ID NO: 1534) |
| 674 | MLH1 (SEQ ID NO: 89) | ATGAGGTGGTGATAGA (SEQ ID NO: 1535) |
| 675 | MLH1 (SEQ ID NO: 89) | TATCGTTTTTCGGAGG (SEQ ID NO: 1380) |
| 676 | MLH1 (SEQ ID NO: 89) | TATTGTTTTTTGGAGGT (SEQ ID NO: 1381) |
| 677 | MLH1 (SEQ ID NO: 89) | TAGAGTTTCGTCGATT (SEQ ID NO: 1382) |
| 678 | MLH1 (SEQ ID NO: 89) | AGAGTTTTGTTGATTTTT (SEQ ID NO: 1383) |
| 679 | PGR (SEQ ID NO: 83) | TTTCGAGGTCGGATTT (SEQ ID NO: 1536) |
| 680 | PGR (SEQ ID NO: 83) | TTTGAGGTTGGATTTTT (SEQ ID NO: 1537) |
| 681 | PGR (SEQ ID NO: 83) | GTGTCGTTTAGTCGTA (SEQ ID NO: 1538) |
| 682 | PGR (SEQ ID NO: 83) | GTTGTTTAGTTGTAGGT (SEQ ID NO: 1539) |
| 683 | PGR (SEQ ID NO: 83) | TTCGACGAAAAGACGT (SEQ ID NO: 1789) |
| 684 | PGR (SEQ ID NO: 83) | TTTTTTCGACGAAAAGA (SEQ ID NO: 1540) |
| 685 | PGR (SEQ ID NO: 83) | AGGATTTTTTTGATGAAA (SEQ ID NO: 1541) |
| 686 | PGR (SEQ ID NO: 83) | TTTTTGATGAAAAGATGT (SEQ ID NO: 1790) |
| 687 | SERPINB5 (SEQ ID NO: 68) | TTATTAACGTGTTTGAGA (SEQ ID NO: 1542) |
| 688 | SERPINB5 (SEQ ID NO: 68) | TTATTAATGTGTTTGAGAA (SEQ ID NO: 1543) |
| 689 | SERPINB5 (SEQ ID NO: 68) | ATTGTCGTACGTATGT (SEQ ID NO: 1544) |
| 690 | SERPINB5 (SEQ ID NO: 68) | AGAGGATTGTTGTATGTA (SEQ ID NO: 1545) |
| 691 | SERPINB5 (SEQ ID NO: 68) | TTTTTTGTTCGAATATGT (SEQ ID NO: 1546) |
| 692 | SERPINB5 (SEQ ID NO: 68) | TTTGTTTGAATATGTTGG (SEQ ID NO: 1547) |
| 693 | RARB (SEQ ID NO: 88) | ATCGAAAGTTTATTCGTATA (SEQ ID NO: 1791) |
| 694 | RARB (SEQ ID NO: 88) | TTATTGAAAGTTTATTTGTA (SEQ ID NO: 1792) |
| 695 | RARB (SEQ ID NO: 88) | ATGTCGAGAACGCGAG (SEQ ID NO: 1548) |
| 696 | RARB (SEQ ID NO: 88) | GGATGTTGAGAATGTGA (SEQ ID NO: 1549) |
| 697 | RARB (SEQ ID NO: 88) | AGCGATTCGAGTAGGG (SEQ ID NO: 1550) |
| 698 | RARB (SEQ ID NO: 88) | AGTGATTTGAGTAGGG (SEQ ID NO: 1551) |
| 699 | RARB (SEQ ID NO: 88) | TAGGATTCGGAACGTA (SEQ ID NO: 1552) |
| 700 | RARB (SEQ ID NO: 88) | GGTAGGATTTGGAATGT (SEQ ID NO: 1553) |
| 701 | SFN (SEQ ID NO: 69) | TAGTACGGTGTCGTAT (SEQ ID NO: 1554) |
| 702 | SFN (SEQ ID NO: 69) | GTTTAGTATGGTGTTGT (SEQ ID NO: 1555) |
| 703 | SFN (SEQ ID NO: 69) | TACGTATTTCGGGTTT (SEQ ID NO: 1556) |
| 704 | SFN (SEQ ID NO: 69) | TATTTATGTATTTTGGGTT (SEQ ID NO: 1557) |
| 705 | SFN (SEQ ID NO: 69) | TTCGTTTTTCGTAGGAG (SEQ ID NO: 1558) |
| 706 | SFN (SEQ ID NO: 69) | TTTGTTTTTTGTAGGAGA (SEQ ID NO: 1559) |
| 707 | SFN (SEQ ID NO: 69) | TTTATAGCGTTCGGTT (SEQ ID NO: 1830) |
| 708 | SFN (SEQ ID NO: 69) | ATAGTGTTTGGTTTGTT (SEQ ID NO: 1831) |
| 709 | SOD2 (SEQ ID NO: 105) | GTCGTTTAGTCGGTTTA (SEQ ID NO: 1711) |
| 710 | SOD2 (SEQ ID NO: 105) | GTTGTTTAGTTGGTTTAT (SEQ ID NO: 1712) |
| 711 | SOD2 (SEQ ID NO: 105) | TATTAGGCGGTTGCGG (SEQ ID NO: 1713) |
| 712 | SOD2 (SEQ ID NO: 105) | TATTAGGTGGTTGTGG (SEQ ID NO: 1714) |
| 713 | SOD2 (SEQ ID NO: 105) | TACGGTTCGAAGGTTT (SEQ ID NO: 1715) |
| 714 | SOD2 (SEQ ID NO: 105) | AGTTGGTATGGTTTGA (SEQ ID NO: 1716) |
| 715 | SOD2 (SEQ ID NO: 105) | GTTTCGGTAATTTCGT (SEQ ID NO: 1384) |
| 716 | SOD2 (SEQ ID NO: 105) | GGTTTTGGTAATTTTGTT (SEQ ID NO: 1385) |
| 717 | TERT (SEQ ID NO: 92) | AAGACGTATTGTTCGT (SEQ ID NO: 1386) |
| 718 | TERT (SEQ ID NO: 92) | AAGATGTATTGTTTGTTG (SEQ ID NO: 1387) |
| 719 | TERT (SEQ ID NO: 92) | AGGTGTACGGTTTCGT (SEQ ID NO: 1793) |
| 720 | TERT (SEQ ID NO: 92) | AGGTGTATGGTTTTGT (SEQ ID NO: 1794) |
| 721 | TERT (SEQ ID NO: 92) | TATAACGAACGTCGTT (SEQ ID NO: 1795) |
| 722 | TERT (SEQ ID NO: 92) | AGGTATAATGAATGTTGT (SEQ ID NO: 1796) |
| 723 | TERT (SEQ ID NO: 92) | ATTACGCGTAGTGTTT (SEQ ID NO: 1388) |
| 724 | TERT (SEQ ID NO: 92) | TGGGAATTATGTGTAGT (SEQ ID NO: 1389) |
| 725 | TGFBR2 (SEQ ID NO: 93) | AAGACGGTTAGGTCGG (SEQ ID NO: 1825) |
| 726 | TGFBR2 (SEQ ID NO: 93) | AAGATGGTTAGGTTGG (SEQ ID NO: 1826) |
| 727 | TGFBR2 (SEQ ID NO: 93) | TTTTATTTCGAAGCGG (SEQ ID NO: 1390) |
| 728 | TGFBR2 (SEQ ID NO: 93) | TTTGAAGTGGGTTTATT (SEQ ID NO: 1391) |
| 729 | TGFBR2 (SEQ ID NO: 93) | ATGGGGCGGACGAATA (SEQ ID NO: 1560) |
| 730 | TGFBR2 (SEQ ID NO: 93) | ATGGGGTGGATGAATA (SEQ ID NO: 1561) |
| 731 | TGFBR2 (SEQ ID NO: 93) | ATAACGTATTAGGAGCGG (SEQ ID NO: 1392) |
| 732 | TGFBR2 (SEQ ID NO: 93) | ATAATGTATTAGGAGTGG (SEQ ID NO: 1393) |
| 733 | THRB (SEQ ID NO: 106) | GAGCGTCGTAAGAATT (SEQ ID NO: 1394) |
| 734 | THRB (SEQ ID NO: 106) | GGAGTGTTGTAAGAATT (SEQ ID NO: 1395) |
| 735 | THRB (SEQ ID NO: 106) | GGGCGGTTAAGTCGAG (SEQ ID NO: 1562) |
| 736 | THRB (SEQ ID NO: 106) | GGGTGGTTAAGTTGAG (SEQ ID NO: 1563) |
| 737 | THRB (SEQ ID NO: 106) | TTTAATCGTAGCGGTT (SEQ ID NO: 1396) |
| 738 | THRB (SEQ ID NO: 106) | AATTGTAGTGGTTTTGT (SEQ ID NO: 1397) |
| 739 | THRB (SEQ ID NO: 106) | TAGCGTCGAATTTAGT (SEQ ID NO: 1398) |
| 740 | THRB (SEQ ID NO: 106) | TTAGTGTTGAATTTAGTG (SEQ ID NO: 1399) |
| 741 | TIMP3 (SEQ ID NO: 103) | TTATTAACGGAGGAAGG (SEQ ID NO: 1564) |
| 742 | TIMP3 (SEQ ID NO: 103) | TATTAATGGAGGAAGGG (SEQ ID NO: 1565) |
| 743 | TIMP3 (SEQ ID NO: 103) | TTCGTTATGTGTACGGAA (SEQ ID NO: 1566) |
| 744 | TIMP3 (SEQ ID NO: 103) | TTTGTTATGTGTATGGAA (SEQ ID NO: 1567) |
| 745 | TIMP3 (SEQ ID NO: 103) | GAGTATTTCGAGTTTGT (SEQ ID NO: 1568) |
| 746 | TIMP3 (SEQ ID NO: 103) | AGTATTTTGAGTTTGTATT (SEQ ID NO: 1569) |
| 747 | TIMP3 (SEQ ID NO: 103) | TAAGCGTTAATCGAGT (SEQ ID NO: 1570) |
| 748 | TIMP3 (SEQ ID NO: 103) | TAGGTAAGTGTTAATTGA (SEQ ID NO: 1571) |
| 749 | TP53 (SEQ ID NO: 80) | AGGATTTTCGTCGATT (SEQ ID NO: 1400) |
| 750 | TP53 (SEQ ID NO: 80) | TTAGGTTTTTGTTGATTT (SEQ ID NO: 1401) |
| 751 | TP53 (SEQ ID NO: 80) | TAATTCGTTTGTCGGA (SEQ ID NO: 1402) |
| 752 | TP53 (SEQ ID NO: 80) | ATTTGTTTGTTGGAGGA (SEQ ID NO: 1403) |
| 753 | TP53 (SEQ ID NO: 80) | TGGATAGTCGTTATGAT (SEQ ID NO: 1404) |
| 545 | TP53 (SEQ ID NO: 80) | TTGGATAGTTGTTATGAT (SEQ ID NO: 1405) |
| 755 | TP53 (SEQ ID NO: 80) | AATTTTTGCGAGGTTT (SEQ ID NO: 1406) |
| 756 | TP53 (SEQ ID NO: 80) | TAATTTTTGTGAGGTTTT (SEQ ID NO: 1407) |
| 757 | TP73 (SEQ ID NO: 86) | TAGGATTCGCGTTTTT (SEQ ID NO: 1572) |
| 758 | TP73 (SEQ ID NO: 86) | GGTAGGATTTGTGTTTT (SEQ ID NO: 1573) |
| 759 | TP73 (SEQ ID NO: 86) | TTTTTCGCGAGCGTTA (SEQ ID NO: 1408) |
| 760 | TP73 (SEQ ID NO: 86) | TTTTGTGAGTGTTAAGT (SEQ ID NO: 1409) |
| 761 | TP73 (SEQ ID NO: 86) | GGGTCGATTTAATTTCGA (SEQ ID NO: 1410) |
| 762 | TP73 (SEQ ID NO: 86) | GGGTTGATTTAATTTTGA (SEQ ID NO: 1411) |
| 763 | TP73 (SEQ ID NO: 86) | TTTCGGAGTTGCGAGT (SEQ ID NO: 1574) |
| 764 | TP73 (SEQ ID NO: 86) | TAGTTTTGGAGTTGTGA (SEQ ID NO: 1575) |
| 765 | NME1 (SEQ ID NO: 107) | AGTCGAGATTGCGTTA (SEQ ID NO: 1805) |
| 766 | NME1 (SEQ ID NO: 107) | AGTTGAGATTGTGTTAG (SEQ ID NO: 1806) |
| 767 | NME1 (SEQ ID NO: 107) | ATCGTTTGAATTCGGGA (SEQ ID NO: 1807) |
| 768 | NME1 (SEQ ID NO: 107) | ATTGTTTGAATTTGGGA (SEQ ID NO: 1808) |
| 769 | NME1 (SEQ ID NO: 107) | AATTCGAGATTAGTTCGG (SEQ ID NO: 1717) |
| 770 | NME1 (SEQ ID NO: 107) | AATTTGAGATTAGTTTGG (SEQ ID NO: 1718) |
| 771 | NME1 (SEQ ID NO: 107) | TTTTAGTACGTTGGAAA (SEQ ID NO: 1809) |
| 772 | NME1 (SEQ ID NO: 107) | TTAGTATGTTGGAAAGTA (SEQ ID NO: 1810) |
| 773 | CDH13 (SEQ ID NO: 70) | TAAAACGAGGGAGCGT (SEQ ID NO: 1576) |
| 774 | CDH13 (SEQ ID NO: 70) | AAAATGAGGGAGTGTT (SEQ ID NO: 1577) |
| 775 | CDH13 (SEQ ID NO: 70) | TAGTCGCGTGTATGAA (SEQ ID NO: 1578) |
| 776 | CDH13 (SEQ ID NO: 70) | TGTAGTTGTGTGTATGA (SEQ ID NO: 1579) |
| 777 | CDH13 (SEQ ID NO: 70) | ATGAAAACGTCGTCGG (SEQ ID NO: 1580) |
| 778 | CDH13 (SEQ ID NO: 70) | AATGAAAATGTTGTTGG (SEQ ID NO: 1581) |
| 779 | CDH13 (SEQ ID NO: 70) | TAGTCGAGAATTTCGT (SEQ ID NO: 1582) |
| 780 | CDH13 (SEQ ID NO: 70) | TGTAGTTGAGAATTTTGT (SEQ ID NO: 1583) |
| 781 | THBS1 (SEQ ID NO: 81) | TTGGCGCGTAATTTTT (SEQ ID NO: 1811) |
| 782 | THBS1 (SEQ ID NO: 81) | TGTTTGGTGTGTAATTT (SEQ ID NO: 1812) |
| 783 | THBS1 (SEQ ID NO: 81) | TAAAGGGGCGTTCGTA (SEQ ID NO: 1719) |
| 784 | THBS1 (SEQ ID NO: 81) | AAGGGGTGTTTGTATT (SEQ ID NO: 1720) |
| 785 | THBS1 (SEQ ID NO: 81) | GGTTAGTTCGGGCGTA (SEQ ID NO: 1721) |
| 786 | THBS1 (SEQ ID NO: 81) | GGTTAGTTTGGGTGTA (SEQ ID NO: 1722) |
| 787 | THBS1 (SEQ ID NO: 81) | TTGTGCGTTCGGAGTA (SEQ ID NO: 1723) |
| 788 | THBS1 (SEQ ID NO: 81) | TGTGTTTGGAGTAGAG (SEQ ID NO: 1724) |
| 789 | TMS1/ASC (SEQ ID NO: 84) | TTCGTTTCGGAGTCGA (SEQ ID NO: 1584) |
| 790 | TMS1/ASC (SEQ ID NO: 84) | TTTGTTTTGGAGTTGAT (SEQ ID NO: 1585) |
| 791 | TMS1/ASC (SEQ ID NO: 84) | TTCGGAGTCGATTTTT (SEQ ID NO: 1412) |
| 792 | TMS1/ASC (SEQ ID NO: 84) | GTTTTGGAGTTGATTTTT (SEQ ID NO: 1413) |
| 793 | TMS1/ASC (SEQ ID NO: 84) | ATTTGATCGTCGAGGA (SEQ ID NO: 1414) |
| 794 | TMS1/ASC (SEQ ID NO: 84) | TTGATTGTTGAGGAGT (SEQ ID NO: 1415) |
| 795 | TMS1/ASC (SEQ ID NO: 84) | AGGGTTACGGGCGTAT (SEQ ID NO: 1416) |
| 796 | TMS1/ASC (SEQ ID NO: 84) | AGGGTTATGGGTGTAT (SEQ ID NO: 1417) |
| 797 | ESR1 (SEQ ID NO: 75) | AAATCGGCGGGTTATT (SEQ ID NO: 1725) |
| 798 | ESR1 (SEQ ID NO: 75) | AGAAATTGGTGGGTTA (SEQ ID NO: 1726) |
| 799 | ESR1 (SEQ ID NO: 75) | AGATCGTGTTTTCGTA (SEQ ID NO: 1836) |
| 800 | ESR1 (SEQ ID NO: 75) | ATTGTGTTTTTGTAGGG (SEQ ID NO: 1837) |
| 801 | ESR1 (SEQ ID NO: 75) | AGTTGCGGACGGTTTA (SEQ ID NO: 1727) |
| 802 | ESR1 (SEQ ID NO: 75) | AGTTGTGGATGGTTTA (SEQ ID NO: 1728) |
| 803 | IL6 (SEQ ID NO: 99) | AGATGTCGTCGAGGAT (SEQ ID NO: 1813) |
| 804 | IL6 (SEQ ID NO: 99) | ATGTTGTTGAGGATGTA (SEQ ID NO: 1814) |
| 805 | IL6 (SEQ ID NO: 99) | TATGCGTATCGGGTTT (SEQ ID NO: 1418) |
| 806 | IL6 (SEQ ID NO: 99) | ATGTGTATTGGGTTTTT (SEQ ID NO: 1419) |
| 807 | IL6 (SEQ ID NO: 99) | TTCGGTTATACGTAGG (SEQ ID NO: 1729) |
| 808 | IL6 (SEQ ID NO: 99) | TTTTGGTTATATGTAGGG (SEQ ID NO: 1730) |
| 809 | IL6 (SEQ ID NO: 99) | AGTTTAGTCGGTTTCGT (SEQ ID NO: 1731) |
| 810 | IL6 (SEQ ID NO: 99) | AGTTTAGTTGGTTTTGT (SEQ ID NO: 1732) |
| 811 | APAF1 (SEQ ID NO: 82) | GATTCGCGAAGATTTG (SEQ ID NO: 1420) |
| 812 | APAF1 (SEQ ID NO: 82) | GATTTGTGAAGATTTGAG (SEQ ID NO: 1421) |
| 813 | APAF1 (SEQ ID NO: 82) | GTGTCGTAGCGGTATT (SEQ ID NO: 1586) |
| 814 | APAF1 (SEQ ID NO: 82) | GGTGTTGTAGTGGTAT (SEQ ID NO: 1587) |
| 815 | APAF1 (SEQ ID NO: 82) | AGTAGCGTCGGGTTTT (SEQ ID NO: 1588) |
| 816 | APAF1 (SEQ ID NO: 82) | GAGTAGTGTTGGGTTT (SEQ ID NO: 1589) |
| 817 | APAF1 (SEQ ID NO: 82) | TGGACGTTTATTTCGT (SEQ ID NO: 1422) |
| 818 | APAF1 (SEQ ID NO: 82) | GTGGATGTTTATTTTGTT (SEQ ID NO: 1423) |
| 819 | CASP8 (SEQ ID NO: 71) | AGGTAACGGTTTAGAG (SEQ ID NO: 1424) |
| 820 | CASP8 (SEQ ID NO: 71) | AGGTAATGGTTTAGAGA (SEQ ID NO: 1425) |
| 821 | CASP8 (SEQ ID NO: 71) | TGTATTCGAGGCGGTA (SEQ ID NO: 1733) |
| 822 | CASP8 (SEQ ID NO: 71) | TTGTATTTGAGGTGGT (SEQ ID NO: 1734) |
| 823 | CASP8 (SEQ ID NO: 71) | ATTTTTTAAACGGGTTTA (SEQ ID NO: 1735) |
| 824 | CASP8 (SEQ ID NO: 71) | TTTTAAATGGGTTTATAGG (SEQ ID NO: 1736) |
| 825 | CASP8 (SEQ ID NO: 71) | ATCGTAGTTTTCGAGT (SEQ ID NO: 1737) |
| 826 | CASP8 (SEQ ID NO: 71) | ATTGTAGTTTTTGAGTTT (SEQ ID NO: 1738) |
| 827 | SYK (SEQ ID NO: 60) | GAAGTTATCGCGTTGG (SEQ ID NO: 1590) |
| 828 | SYK (SEQ ID NO: 60) | AGAAGTTATTGTGTTGG (SEQ ID NO: 1591) |
| 829 | SYK (SEQ ID NO: 60) | GATCGATGCGGTTTAT (SEQ ID NO: 1592) |
| 830 | SYK (SEQ ID NO: 60) | GGGATTGATGTGGTTT (SEQ ID NO: 1593) |
| 831 | SYK (SEQ ID NO: 60) | GGCGTTTTAGTCGATT (SEQ ID NO: 1594) |
| 832 | SYK (SEQ ID NO: 60) | GGTGTTTTAGTTGATTTT (SEQ ID NO: 1595) |
| 833 | SYK (SEQ ID NO: 60) | TTATTCGGTCGGGATT (SEQ ID NO: 1596) |
| 834 | SYK (SEQ ID NO: 60) | TTTATTTGGTTGGGATT (SEQ ID NO: 1597) |
| 835 | HOXA5 (SEQ ID NO: 78) | TTCGAGTTCGGTTGAA (SEQ ID NO: 1739) |
| 836 | HOXA5 (SEQ ID NO: 78) | GTTTGAGTTTGGTTGAA (SEQ ID NO: 1740) |
| 837 | HOXA5 (SEQ ID NO: 78) | TAGTTTTCGGTCGGAA (SEQ ID NO: 1741) |
| 838 | HOXA5 (SEQ ID NO: 78) | TAGTTTTTGGTTGGAAG (SEQ ID NO: 1742) |
| 839 | HOXA5 (SEQ ID NO: 78) | TAATTCGATTTCGGTTT (SEQ ID NO: 1743) |
| 840 | HOXA5 (SEQ ID NO: 78) | TTTAATTTGATTTTGGTTT (SEQ ID NO: 1744) |
| 841 | HOXA5 (SEQ ID NO: 78) | ATCGGTAGTTGACGGTT (SEQ ID NO: 1745) |
| 842 | HOXA5 (SEQ ID NO: 78) | ATTGGTAGTTGATGGTT (SEQ ID NO: 1746) |
| 843 | FABP3 (SEQ ID NO: 77) | GATGGGCGTATTAGTT (SEQ ID NO: 1598) |
| 844 | FABP3 (SEQ ID NO: 77) | GGGATGGGTGTATTAG (SEQ ID NO: 1599) |
| 845 | FABP3 (SEQ ID NO: 77) | GTGATGCGAGGGTTAT (SEQ ID NO: 1600) |
| 846 | FABP3 (SEQ ID NO: 77) | GTGATGTGAGGGTTAT (SEQ ID NO: 1601) |
| 847 | FABP3 (SEQ ID NO: 77) | TAAAGCGGTAGTTCGG (SEQ ID NO: 1602) |
| 848 | FABP3 (SEQ ID NO: 77) | AAGTGGTAGTTTGGGT (SEQ ID NO: 1603) |
| 849 | FABP3 (SEQ ID NO: 77) | TATTGGCGTTGACGTA (SEQ ID NO: 1604) |
| 850 | FABP3 (SEQ ID NO: 77) | TGGTGTTGATGTAGGT (SEQ ID NO: 1605) |
| 851 | RASSF1A (SEQ ID NO: 90) | TACGGGTATTTTCGCGT (SEQ ID NO: 1606) |
| 852 | RASSF1A (SEQ ID NO: 90) | ATATGGGTATTTTTGTGT (SEQ ID NO: 1607) |
| 853 | RASSF1A (SEQ ID NO: 90) | AGAGCGCGTTTAGTTT (SEQ ID NO: 1608) |
| 854 | RASSF1A (SEQ ID NO: 90) | GAGAGTGTGTTTAGTTT (SEQ ID NO: 1609) |
| 855 | RASSF1A (SEQ ID NO: 90) | AGTAAATCGGATTAGGA (SEQ ID NO: 1610) |
| 856 | RASSF1A (SEQ ID NO: 90) | AGTAAATTGGATTAGGAG (SEQ ID NO: 1611) |
| 857 | RARA (SEQ ID NO: 108) | TTCGGGATGTACGTTT (SEQ ID NO: 1747) |
| 858 | RARA (SEQ ID NO: 108) | TTTGGGATGTATGTTTT (SEQ ID NO: 1748) |
| 859 | RARA (SEQ ID NO: 108) | GAATTAGTATCGGTTTTT (SEQ ID NO: 1749) |
| 860 | RARA (SEQ ID NO: 108) | ATTAGTATTGGTTTTTGG (SEQ ID NO: 1750) |
| 861 | RARA (SEQ ID NO: 108) | AAAGTTTCGTTTAAGGT (SEQ ID NO: 1426) |
| 862 | RARA (SEQ ID NO: 108) | AAAGTTTTGTTTAAGGTG (SEQ ID NO: 1427) |
| 863 | RARA (SEQ ID NO: 108) | TTTCGGCGAGTAAAGT (SEQ ID NO: 1428) |
| 864 | RARA (SEQ ID NO: 108) | TTTTTGGTGAGTAAAGT (SEQ ID NO: 1429) |
| 865 | TWIST (SEQ ID NO: 100) | AGTAAAGGCGTTGCGT (SEQ ID NO: 1612) |
| 866 | TWIST (SEQ ID NO: 100) | AGTAAAGGTGTTGTGT (SEQ ID NO: 1613) |
| 867 | TWIST (SEQ ID NO: 100) | TATTTTTCGAGGCGTA (SEQ ID NO: 1614) |
| 868 | TWIST (SEQ ID NO: 100) | TTTTGAGGTGTAGTTTT (SEQ ID NO: 1615) |
| 869 | TWIST (SEQ ID NO: 100) | ATTGGGTCGTTGTAGA (SEQ ID NO: 1616) |
| 870 | TWIST (SEQ ID NO: 100) | ATTGGGTTGTTGTAGA (SEQ ID NO: 1617) |
| 871 | TWIST (SEQ ID NO: 100) | TAGGTCGGGACGTAAA (SEQ ID NO: 1618) |
| 872 | TWIST (SEQ ID NO: 100) | AGTAGGTTGGGATGTA (SEQ ID NO: 1619) |
| 873 | AR (SEQ ID NO: 61) | TTAAGAGGCGAAAAGT (SEQ ID NO: 1430) |
| 874 | AR (SEQ ID NO: 61) | AAGAGGTGAAAAGTAGT (SEQ ID NO: 1431) |
| 875 | AR (SEQ ID NO: 61) | AATATGCGAAGGTAATT (SEQ ID NO: 1432) |
| 876 | AR (SEQ ID NO: 61) | TTAAAATATGTGAAGGTAA (SEQ ID NO: 1433) |
| 877 | AR (SEQ ID NO: 61) | AAGTAAGCGGTTGTAT (SEQ ID NO: 1434) |
| 878 | AR (SEQ ID NO: 61) | AAGTAAGTGGTTGTATAT (SEQ ID NO: 1435) |
| 879 | AR (SEQ ID NO: 61) | ATTGAGCGTTTATGTG (SEQ ID NO: 1436) |
| 880 | AR (SEQ ID NO: 61) | ATTGAGTGTTTATGTGT (SEQ ID NO: 1437) |
| 881 | ESR2 (SEQ ID NO: 91) | GAGTATTTTCGAATCGA (SEQ ID NO: 1620) |
| 882 | ESR2 (SEQ ID NO: 91) | GGAGTATTTTTGAATTGA (SEQ ID NO: 1621) |
| 883 | ESR2 (SEQ ID NO: 91) | ATAAGCGATTTAACGAT (SEQ ID NO: 1622) |
| 884 | ESR2 (SEQ ID NO: 91) | AAGTGATTTAATGATAAGT (SEQ ID NO: 1623) |
| 885 | ESR2 (SEQ ID NO: 91) | ATTTCGAGGATTACGT (SEQ ID NO: 1438) |
| 886 | ESR2 (SEQ ID NO: 91) | ATATTTTGAGGATTATGTT (SEQ ID NO: 1439) |
| 887 | ESR2 (SEQ ID NO: 91) | TTTACGTGATCGAGTT (SEQ ID NO: 1624) |
| 888 | ESR2 (SEQ ID NO: 91) | AGTTTATGTGATTGAGTT (SEQ ID NO: 1625) |
| 889 | PLAU (SEQ ID NO: 62) | TATTTGTCGCGTTGAT (SEQ ID NO: 1626) |
| 890 | PLAU (SEQ ID NO: 62) | ATTTGTTGTGTTGATGA (SEQ ID NO: 1627) |
| 891 | PLAU (SEQ ID NO: 62) | TGTAATTCGGGGATTT (SEQ ID NO: 1628) |
| 892 | PLAU (SEQ ID NO: 62) | TTGTAATTTGGGGATTT (SEQ ID NO: 1629) |
| 893 | PLAU (SEQ ID NO: 62) | TTGGAGATCGCGTTTT (SEQ ID NO: 1630) |
| 894 | PLAU (SEQ ID NO: 62) | TTGGAGATTGTGTTTTT (SEQ ID NO: 1631) |
| 895 | PLAU (SEQ ID NO: 62) | GAGCGTTGCGGAAGTA (SEQ ID NO: 1632) |
| 896 | PLAU (SEQ ID NO: 62) | GAGTGTTGTGGAAGTA (SEQ ID NO: 1633) |
| 897 | STAT1 (SEQ ID NO: 109) | GTTATTTTCGAGAGTTG (SEQ ID NO: 1634) |
| 898 | STAT1 (SEQ ID NO: 109) | GTTATTTTTGAGAGTTGT (SEQ ID NO: 1635) |
| 899 | STAT1 (SEQ ID NO: 109) | AGGTTAACGTTCGTAT (SEQ ID NO: 1440) |
| 900 | STAT1 (SEQ ID NO: 109) | TTAGGTTAATGTTTGTATT (SEQ ID NO: 1441) |
| 901 | STAT1 (SEQ ID NO: 109) | TAATTTCGATAGTTTTGG (SEQ ID NO: 1442) |
| 902 | STAT1 (SEQ ID NO: 109) | TATAATTTTGATAGTTTTGG (SEQ ID NO: 1443) |
| 903 | STAT1 (SEQ ID NO: 109) | ATATGATTTCGGAATTTTA (SEQ ID NO: 1797) |
| 904 | STAT1 (SEQ ID NO: 109) | ATATGATTTTGGAATTTTAA (SEQ ID NO: 1798) |
| 905 | BRCA1 (SEQ ID NO: 66) | AGTTTCGAGAGACGTT (SEQ ID NO: 1636) |
| 906 | BRCA1 (SEQ ID NO: 66) | AGAGTTTTGAGAGATGT (SEQ ID NO: 1637) |
| 907 | BRCA1 (SEQ ID NO: 66) | TTTCGTGGTAACGGAA (SEQ ID NO: 1638) |
| 908 | BRCA1 (SEQ ID NO: 66) | TTTGTGGTAATGGAAAA (SEQ ID NO: 1639) |
| 909 | BRCA1 (SEQ ID NO: 66) | AAAGCGCGGGAATTAT (SEQ ID NO: 1640) |
| 910 | BRCA1 (SEQ ID NO: 66) | GGAAAAGTGTGGGAAT (SEQ ID NO: 1641) |
| 911 | BRCA1 (SEQ ID NO: 66) | TTTACGTTATTCGGGG (SEQ ID NO: 1444) |
| 912 | BRCA1 (SEQ ID NO: 66) | TATGTTATTTGGGGGTA (SEQ ID NO: 1445) |
| 913 | LOT1 (SEQ ID NO: 95) | ATGGGTACGTTTAAGG (SEQ ID NO: 1642) |
| 914 | LOT1 (SEQ ID NO: 95) | TGGGTATGTTTAAGGG (SEQ ID NO: 1643) |
| 915 | LOT1 (SEQ ID NO: 95) | AAATTAGTTACGTTATTTAA (SEQ ID NO: 1644) |
| 916 | LOT1 (SEQ ID NO: 95) | TGAAATTAGTTATGTTATTTA (SEQ ID NO: 1645) |
| 917 | LOT1 (SEQ ID NO: 95) | GAGTTTCGTGGTTGAA (SEQ ID NO: 1799) |
| 918 | LOT1 (SEQ ID NO: 95) | GAGTTTTGTGGTTGAA (SEQ ID NO: 1800) |
| 919 | LOT1 (SEQ ID NO: 95) | ATGTCGGTTATTACGT (SEQ ID NO: 1646) |
| 920 | LOT1 (SEQ ID NO: 95) | TGTTGGTTATTATGTAGA (SEQ ID NO: 1647) |
| 921 | PRSS8 (SEQ ID NO: 72) | AGTTGGCGGAGTTTAG (SEQ ID NO: 1648) |
| 922 | PRSS8 (SEQ ID NO: 72) | AGTTGGTGGAGTTTAG (SEQ ID NO: 1649) |
| 923 | PRSS8 (SEQ ID NO: 72) | ATTTTGCGTGGTTAGA (SEQ ID NO: 1446) |
| 924 | PRSS8 (SEQ ID NO: 72) | GATTTTGTGTGGTTAGA (SEQ ID NO: 1447) |
| 925 | PRSS8 (SEQ ID NO: 72) | TTGGTGATTCGTTTATAT (SEQ ID NO: 1650) |
| 926 | PRSS8 (SEQ ID NO: 72) | GTTGGTGATTTGTTTATA (SEQ ID NO: 1651) |
| 927 | PRSS8 (SEQ ID NO: 72) | TGTTCGTTTCGGATAT (SEQ ID NO: 1652) |
| 928 | PRSS8 (SEQ ID NO: 72) | TTTGTTTTGGATATTTTAG (SEQ ID NO: 1653) |
| 929 | SNCG (SEQ ID NO: 73) | TGCGGTAGTATTCGAGT (SEQ ID NO: 1751) |
| 930 | SNCG (SEQ ID NO: 73) | TGTGGTAGTATTTGAGT (SEQ ID NO: 1752) |
| 931 | SNCG (SEQ ID NO: 73) | TATCGGGGATAGTCGTT (SEQ ID NO: 1815) |
| 932 | SNCG (SEQ ID NO: 73) | TATTGGGGATAGTTGTT (SEQ ID NO: 1816) |
| 933 | SNCG (SEQ ID NO: 73) | TATCGGCGTTAATAGG (SEQ ID NO: 1817) |
| 934 | SNCG (SEQ ID NO: 73) | TATTGGTGTTAATAGGAG (SEQ ID NO: 1818) |
| 935 | SNCG (SEQ ID NO: 73) | ATTGTACGTAGGGTTG (SEQ ID NO: 1819) |
| 936 | SNCG (SEQ ID NO: 73) | TTTTATTGTATGTAGGGT (SEQ ID NO: 1820) |
| 937 | TPM1 (SEQ ID NO: 110) | TTGATTCGCGTTCGTA (SEQ ID NO: 1654) |
| 938 | TPM1 (SEQ ID NO: 110) | TGATTTGTGTTTGTAGA (SEQ ID NO: 1655) |
| 939 | TPM1 (SEQ ID NO: 110) | AAGAGTCGTTTTAGGT (SEQ ID NO: 1448) |
| 940 | TPM1 (SEQ ID NO: 110) | TAAGAGTTGTTTTAGGTT (SEQ ID NO: 1449) |
| 941 | TPM1 (SEQ ID NO: 110) | GTCGAGAGCGTATTGA (SEQ ID NO: 1450) |
| 942 | TPM1 (SEQ ID NO: 110) | GGTGTTGAGAGTGTAT (SEQ ID NO: 1451) |
| 943 | TPM1 (SEQ ID NO: 110) | GGCGACGCGTATTTAT (SEQ ID NO: 1452) |
| 944 | TPM1 (SEQ ID NO: 110) | GGGGTGATGTGTATTT (SEQ ID NO: 1453) |
| 945 | GPC3 (SEQ ID NO: 118) | AATAGTCGCGTTTAGG (SEQ ID NO: 1753) |
| 946 | GPC3 (SEQ ID NO: 118) | TAGTTGTGTTTAGGGAT (SEQ ID NO: 1754) |
| 947 | GPC3 (SEQ ID NO: 118) | TTTAACGTAGTTTTGATCGG (SEQ ID NO: 1755) |
| 948 | GPC3 (SEQ ID NO: 118) | TTTAATGTAGTTTTGATTGG (SEQ ID NO: 1756) |
| 949 | GPC3 (SEQ ID NO: 118) | TTTTTCGGGAATCGTT (SEQ ID NO: 1454) |
| 950 | GPC3 (SEQ ID NO: 118) | AGTTTTTTGGGAATTGT (SEQ ID NO: 1455) |
| 951 | GPC3 (SEQ ID NO: 118) | TTCGAGCGCGTTGATT (SEQ ID NO: 1456) |
| 952 | GPC3 (SEQ ID NO: 118) | TAGGTTTGAGTGTGTT (SEQ ID NO: 1457) |
| 953 | CLDN7 (SEQ ID NO: 87) | TTACGTTAAGTCGGGT (SEQ ID NO: 1757) |
| 954 | CLDN7 (SEQ ID NO: 87) | AGTTATGTTAAGTTGGG (SEQ ID NO: 1758) |
| 955 | CLDN7 (SEQ ID NO: 87) | TAGCGTTTTAGGCGTA (SEQ ID NO: 1759) |
| 956 | CLDN7 (SEQ ID NO: 87) | TAGTGTTTTAGGTGTATT (SEQ ID NO: 1760) |
| 957 | CLDN7 (SEQ ID NO: 87) | TTAGGGGCGTTTCGTA (SEQ ID NO: 1761) |
| 958 | CLDN7 (SEQ ID NO: 87) | TTAGGGGTGTTTTGTAG (SEQ ID NO: 1762) |
| 959 | CLDN7 (SEQ ID NO: 87) | TAGAATTCGGCGGGGA (SEQ ID NO: 1763) |
| 960 | CLDN7 (SEQ ID NO: 87) | TAGAATTTGGTGGGGA (SEQ ID NO: 1764) |
| 961 | SLC19A1 (SEQ ID NO: 116) | TATAAGTTCGTACGGG (SEQ ID NO: 1458) |
| 962 | SLC19A1 (SEQ ID NO: 116) | ATAAGTTTGTATGGGTTA (SEQ ID NO: 1459) |
| 963 | SLC19A1 (SEQ ID NO: 116) | GTCGTGCGGTTTTTAA (SEQ ID NO: 1656) |
| 964 | SLC19A1 (SEQ ID NO: 116) | GGTTGTGTGGTTTTTAA (SEQ ID NO: 1657) |
| 965 | SLC19A1 (SEQ ID NO: 116) | TTACGAAGGCGGTTTA (SEQ ID NO: 1658) |
| 966 | SLC19A1 (SEQ ID NO: 116) | TTTTATGAAGGTGGTTT (SEQ ID NO: 1659) |
| 967 | SLC19A1 (SEQ ID NO: 116) | GGTTCGATTCGCGTTT (SEQ ID NO: 1460) |
| 968 | SLC19A1 (SEQ ID NO: 116) | TGGGTTTGATTTGTGTT (SEQ ID NO: 1461) |
| 969 | GJB2 (SEQ ID NO: 111) | GGATTTCGTCGGTATT (SEQ ID NO: 1660) |
| 970 | GJB2 (SEQ ID NO: 111) | GGGGATTTTGTTGGTA (SEQ ID NO: 1661) |
| 971 | GJB2 (SEQ ID NO: 111) | TTTCGCGATTCGAATA (SEQ ID NO: 1462) |
| 972 | GJB2 (SEQ ID NO: 111) | TAGTTTTTGTGATTTGAA (SEQ ID NO: 1463) |
| 973 | GJB2 (SEQ ID NO: 111) | TTTCGTATTATGCGGA (SEQ ID NO: 1801) |
| 974 | GJB2 (SEQ ID NO: 111) | TTTGTATTATGTGGAGTA (SEQ ID NO: 1802) |
| 975 | GJB2 (SEQ ID NO: 111) | GAATTTCGTTTACGGT (SEQ ID NO: 1662) |
| 976 | GJB2 (SEQ ID NO: 111) | TTGAATTTTGTTTATGGT (SEQ ID NO: 1663) |
| 977 | SLIT2 (SEQ ID NO: 112) | TTCGATAGTTAACGATG (SEQ ID NO: 1765) |
| 978 | SLIT2 (SEQ ID NO: 112) | TTTGATAGTTAATGATGGT (SEQ ID NO: 1766) |
| 979 | SLIT2 (SEQ ID NO: 112) | ATTTCGTCGTAGTTTG (SEQ ID NO: 1767) |
| 980 | SLIT2 (SEQ ID NO: 112) | TTTTGTTGTAGTTTGGA (SEQ ID NO: 1768) |
| 981 | SLIT2 (SEQ ID NO: 112) | TAGCGGGTTCGTAGTA (SEQ ID NO: 1769) |
| 982 | SLIT2 (SEQ ID NO: 112) | TTAGTGGGTTTGTAGTA (SEQ ID NO: 1770) |
| 983 | SLIT2 (SEQ ID NO: 112) | AAGGCGCGGAAGTTTA (SEQ ID NO: 1771) |
| 984 | SLIT2 (SEQ ID NO: 112) | AAGGTGTGGAAGTTTA (SEQ ID NO: 1772) |
| 985 | IGSF4 (SEQ ID NO: 74) | AGGTAGATCGAGGAGG (SEQ ID NO: 1773) |
| 986 | IGSF4 (SEQ ID NO: 74) | AGGTAGATTGAGGAGG (SEQ ID NO: 1774) |
| 987 | IGSF4 (SEQ ID NO: 74) | TAGTCGTAGAGTCGGG (SEQ ID NO: 1775) |
| 988 | IGSF4 (SEQ ID NO: 74) | GTTGTAGAGTTGGGTT (SEQ ID NO: 1776) |
| 989 | IGSF4 (SEQ ID NO: 74) | TTAGCGGTAGATTCGG (SEQ ID NO: 1464) |
| 990 | IGSF4 (SEQ ID NO: 74) | AGTGGTAGATTTGGGG (SEQ ID NO: 1465) |
| 991 | IGSF4 (SEQ ID NO: 74) | TAGGTTTTCGGATTGA (SEQ ID NO: 1777) |
| 992 | IGSF4 (SEQ ID NO: 74) | GTAGGTTTTTGGATTGA (SEQ ID NO: 1778) |
| 993 | MCT1 (SEQ ID NO: 101) | ATTTTACGTAGGCGTT (SEQ ID NO: 1779) |
| 994 | MCT1 (SEQ ID NO: 101) | GATTTTATGTAGGTGTTT (SEQ ID NO: 1780) |
| 995 | MCT1 (SEQ ID NO: 101) | AGTTAGTCGCGTTTTA (SEQ ID NO: 1781) |
| 996 | MCT1 (SEQ ID NO: 101) | AGAGTTAGTTGTGTTTTA (SEQ ID NO: 1782) |
| 997 | MCT1 (SEQ ID NO: 101) | AGTCGTTATTCGGAAA (SEQ ID NO: 1821) |
| 998 | MCT1 (SEQ ID NO: 101) | TGTAGTTGTTATTTGGAA (SEQ ID NO: 1822) |
| 999 | MCT1 (SEQ ID NO: 101) | TATACGAGGAAGGTCGG (SEQ ID NO: 1783) |
| 1000 | MCT1 (SEQ ID NO: 101) | TATATGAGGAAGGTTGG (SEQ ID NO: 1784) |
| 1001 | CCND2 (SEQ ID NO: 104) | AACGTTATTAGATCGTAT (SEQ ID NO: 1466) |
| 1002 | CCND2 (SEQ ID NO: 104) | AGAAATGTTATTAGATTGT (SEQ ID NO: 1467) |
| 1003 | CCND2 (SEQ ID NO: 104) | TTAGGGTCGATCGTGT (SEQ ID NO: 1486) |
| 1004 | CCND2 (SEQ ID NO: 104) | TAGGGTTGATTGTGTT (SEQ ID NO: 1487) |
| 1005 | CCND2 (SEQ ID NO: 104) | TTATCGTAGTCGGTTT (SEQ ID NO: 1488) |
| 1006 | CCND2 (SEQ ID NO: 104) | GATTTTATTGTAGTTGGT (SEQ ID NO: 1489) |
| 1007 | CCND2 (SEQ ID NO: 104) | GAGTGAGGCGCGAAAT (SEQ ID NO: 1490) |
| 1008 | CCND2 (SEQ ID NO: 104) | GAGTGAGGTGTGAAAT (SEQ ID NO: 1491) |
| 1009 | CCND2 (SEQ ID NO: 104) | AAGGATCGAGCGTGGA (SEQ ID NO: 1492) |
| 1010 | CCND2 (SEQ ID NO: 104) | AAGGATTGAGTGTGGA (SEQ ID NO: 1493) |
| 1011 | CDKN2A (SEQ ID NO: 57) | GGCGTTGTTTAACGTAT (SEQ ID NO: 1496) |
| 1012 | CDKN2A (SEQ ID NO: 57) | GGGTGTTGTTTAATGTA (SEQ ID NO: 1497) |
| 1013 | CDKN2A (SEQ ID NO: 57) | AATAGTTACGGTCGGA (SEQ ID NO: 1498) |
| 1014 | CDKN2A (SEQ ID NO: 57) | AGTTATGGTTGGAGGT (SEQ ID NO: 1499) |
| 1015 | CDKN2A (SEQ ID NO: 57) | GTCGGAGGTCGATTTA (SEQ ID NO: 1500) |
| 1016 | CDKN2A (SEQ ID NO: 57) | GGTTGGAGGTTGATTTA (SEQ ID NO: 1501) |

TABLE 3
Genes and sequences

| | | Sense | Antisense | Sense | Antisense |
|---|---|---|---|---|---|
| | | methylated | methylated | unmethylated | unmethylated |
| | Genomic | converted | converted | converted SEQ | converted SEQ |
| Gene | SEQ ID NO: | SEQ ID NO: | SEQ ID NO: | ID NO: | ID NO: |
| Genomic region | 1 | 493 | 494 | 729 | 730 |
| Genomic region | 2 | 495 | 496 | 731 | 732 |
| Genomic region | 3 | 497 | 498 | 733 | 734 |
| Genomic region | 4 | 499 | 500 | 735 | 736 |
| Genomic region | 5 | 501 | 502 | 737 | 738 |
| Genomic region | 6 | 503 | 504 | 739 | 740 |
| Genomic region | 7 | 505 | 506 | 741 | 742 |
| Genomic region | 8 | 507 | 508 | 743 | 744 |
| Genomic region | 9 | 509 | 510 | 745 | 746 |
| PROSTAGLANDIN E2 RECEPTOR | 10 | 511 | 512 | 747 | 748 |
| ORPHAN NUCLEAR RECEPTOR | 11 | 513 | 514 | 749 | 750 |
| NR5A2 | | | | | |
| LIM DOMAIN KINASE 1 (LIMK-1) | 12 | 515 | 516 | 751 | 752 |
| MSF | 13 | 517 | 518 | 753 | 754 |
| Genomic region | 14 | 519 | 520 | 755 | 756 |
| Genomic region | 15 | 521 | 522 | 757 | 758 |
| Genomic region | 16 | 523 | 524 | 759 | 760 |
| Genomic region | 17 | 525 | 526 | 761 | 762 |
| Genomic region | 18 | 527 | 528 | 763 | 764 |
| Genomic region | 19 | 529 | 530 | 765 | 766 |
| PRDM6 | 20 | 531 | 532 | 767 | 768 |
| RAP2B | 21 | 533 | 534 | 769 | 770 |
| NR2E1 | 22 | 535 | 536 | 771 | 772 |
| PCDH7 | 23 | 537 | 538 | 773 | 774 |
| DKK3 | 24 | 539 | 540 | 775 | 776 |
| RTTN | 25 | 541 | 542 | 777 | 778 |
| Genomic region | 26 | 543 | 544 | 779 | 780 |
| GIRK2 | 27 | 545 | 546 | 781 | 782 |
| Genomic region | 28 | 547 | 548 | 783 | 784 |
| Genomic region | 29 | 549 | 550 | 785 | 786 |
| ARL7 | 30 | 551 | 552 | 787 | 788 |
| Genomic region | 31 | 553 | 554 | 789 | 790 |
| THH | 32 | 555 | 556 | 791 | 792 |
| SNAP25 | 33 | 557 | 558 | 793 | 794 |
| HOXB13 | 34 | 559 | 560 | 795 | 796 |
| Genomic region | 35 | 561 | 562 | 797 | 798 |
| Genomic region | 36 | 563 | 564 | 799 | 800 |
| MGC10561 | 37 | 565 | 566 | 801 | 802 |
| LMX1A | 38 | 567 | 568 | 803 | 804 |
| SENP3 | 39 | 569 | 570 | 805 | 806 |
| GS1 | 40 | 571 | 572 | 807 | 808 |
| TITF1 | 41 | 573 | 574 | 809 | 810 |
| SEQ ID NO: 42 | 42 | 575 | 576 | 811 | 812 |
| DDX51 | 43 | 577 | 578 | 813 | 814 |
| Q8NAN2 | 44 | 579 | 580 | 815 | 816 |
| Genomic region | 45 | 581 | 582 | 817 | 818 |
| Genomic region | 46 | 583 | 584 | 819 | 820 |
| O60279 | 47 | 585 | 586 | 821 | 822 |
| Genomic region | 48 | 587 | 588 | 823 | 824 |
| KOX7 | 49 | 589 | 590 | 825 | 826 |
| BCL11B | 50 | 591 | 592 | 827 | 828 |
| Genomic region | 51 | 593 | 594 | 829 | 830 |
| MGC34831 | 52 | 595 | 596 | 831 | 832 |
| COL5A1 | 53 | 597 | 598 | 833 | 834 |
| Genomic region | 54 | 599 | 600 | 835 | 836 |
| PDLIM1 | 55 | 601 | 602 | 837 | 838 |
| BRCA2 | 56 | 603 | 604 | 839 | 840 |
| CDKN2A | 57 | 605 | 606 | 841 | 842 |
| EYA4 | 58 | 607 | 608 | 843 | 844 |
| GSTP1 | 59 | 609 | 610 | 845 | 846 |
| SYK | 60 | 611 | 612 | 847 | 848 |
| AR | 61 | 613 | 614 | 849 | 850 |
| PLAU | 62 | 615 | 616 | 851 | 852 |
| LEF1 | 63 | 617 | 618 | 853 | 854 |
| ALX4 | 64 | 619 | 620 | 855 | 856 |
| APC | 65 | 621 | 622 | 857 | 858 |
| BRCA1 | 66 | 623 | 624 | 859 | 860 |
| CDKN1A | 67 | 625 | 626 | 861 | 862 |
| SERPINB5 | 68 | 627 | 628 | 863 | 864 |
| SFN | 69 | 629 | 630 | 865 | 866 |
| CDH13 | 70 | 631 | 632 | 867 | 868 |
| CASP8 | 71 | 633 | 634 | 869 | 870 |
| PRSS8 | 72 | 635 | 636 | 871 | 872 |
| SNCG | 73 | 637 | 638 | 873 | 874 |
| IGSF4 | 74 | 639 | 640 | 875 | 876 |
| ESR1 | 75 | 641 | 642 | 877 | 878 |
| FHIT | 76 | 643 | 644 | 879 | 880 |
| FABP3 | 77 | 645 | 646 | 881 | 882 |
| HOXA5 | 78 | 647 | 648 | 883 | 884 |
| CDH1 | 79 | 649 | 650 | 885 | 886 |
| TP53 | 80 | 651 | 652 | 887 | 888 |
| THBS1 | 81 | 653 | 654 | 889 | 890 |
| APAF1 | 82 | 655 | 656 | 891 | 892 |
| PGR | 83 | 657 | 658 | 893 | 894 |
| TMS1/ASC | 84 | 659 | 660 | 895 | 896 |
| HIC1 | 85 | 661 | 662 | 897 | 898 |
| TP73 | 86 | 663 | 664 | 899 | 900 |
| CLDN7 | 87 | 665 | 666 | 901 | 902 |
| RARB | 88 | 667 | 668 | 903 | 904 |
| MLH1 | 89 | 669 | 670 | 905 | 906 |
| RASSF1A | 90 | 671 | 672 | 907 | 908 |
| ESR2 | 91 | 673 | 674 | 909 | 910 |
| TERT | 92 | 675 | 676 | 911 | 912 |
| TGFBR2 | 93 | 677 | 678 | 913 | 914 |
| IGFBP7 | 94 | 679 | 680 | 915 | 916 |
| LOT1 | 95 | 681 | 682 | 917 | 918 |
| S100A7 | 96 | 683 | 684 | 919 | 920 |
| ARH1/NOEY2 | 97 | 685 | 686 | 921 | 922 |
| DAPK1 | 98 | 687 | 688 | 923 | 924 |
| IL6 | 99 | 689 | 690 | 925 | 926 |
| TWIST | 100 | 691 | 692 | 927 | 928 |
| MCT1 | 101 | 693 | 694 | 929 | 930 |
| SASH1 | 102 | 695 | 696 | 931 | 932 |
| TIMP3 | 103 | 697 | 698 | 933 | 934 |
| CCND2 | 104 | 699 | 700 | 935 | 936 |
| SOD2 | 105 | 701 | 702 | 937 | 938 |
| THRB | 106 | 703 | 704 | 939 | 940 |
| NME1 | 107 | 705 | 706 | 941 | 942 |
| RARA | 108 | 707 | 708 | 943 | 944 |
| STAT1 | 109 | 709 | 710 | 945 | 946 |
| TPM1 | 110 | 711 | 712 | 947 | 948 |
| GJB2 | 111 | 713 | 714 | 949 | 950 |
| SLIT2 | 112 | 715 | 716 | 951 | 952 |
| HS3ST2 | 113 | 717 | 718 | 953 | 954 |
| PRDM2 | 114 | 719 | 720 | 955 | 956 |
| SCGB3A1 | 115 | 721 | 722 | 957 | 958 |
| SLC19A1 | 116 | 723 | 724 | 959 | 960 |
| Genomic region | 117 | 725 | 726 | 961 | 962 |
| GPC3 | 118 | 727 | 728 | 963 | 964 |

TABLE 4
Breast cancer vs. all other controls Chip 1

| | | | | | | | | | n |
|---|---|---|---|---|---|---|---|---|---|
| | SEQ ID | | | | | P-value | P-value | | Significant |
| Gene Name | NO: | Accuracy | Sensitivity | Specificity | p-value | (Bonferroni) | FDR | n Oligos | oligos |
| PRDM2 | SEQ ID | 0.781 | 0.798 | 0.754 | 3.34E−39 | 2.04E−37 | 2.04E−37 | 4 | 3 |
| | NO: 114 | | | | | | | | |
| PLAU | SEQ ID | 0.769 | 0.781 | 0.751 | 3.87E−35 | 2.36E−33 | 1.18E−33 | 4 | 4 |
| | NO: 62 | | | | | | | | |
| GSTP1 | SEQ ID | 0.733 | 0.627 | 0.894 | 2.85E−32 | 1.74E−30 | 5.79E−31 | 4 | 4 |
| | NO: 59 | | | | | | | | |
| SLIT2 | SEQ ID | 0.756 | 0.779 | 0.72 | 9.67E−32 | 5.90E−30 | 1.47E−30 | 4 | 4 |
| | NO: 112 | | | | | | | | |
| CCND2 | SEQ ID | 0.732 | 0.724 | 0.745 | 4.10E−27 | 2.50E−25 | 5.00E−26 | 6 | 4 |
| | NO: 104 | | | | | | | | |
| HOXA5 | SEQ ID | 0.689 | 0.676 | 0.71 | 5.15E−24 | 3.14E−22 | 5.23E−23 | 4 | 2 |
| | NO: 78 | | | | | | | | |
| RASSF1A | SEQ ID | 0.727 | 0.702 | 0.766 | 7.95E−24 | 4.85E−22 | 6.93E−23 | 3 | 3 |
| | NO: 90 | | | | | | | | |
| HS3ST2 | SEQ ID | 0.739 | 0.825 | 0.609 | 1.62E−22 | 9.90E−21 | 1.24E−21 | 2 | 2 |
| | NO: 113 | | | | | | | | |
| ARH1/NOEY2 | SEQ ID | 0.737 | 0.685 | 0.815 | 8.93E−20 | 5.45E−18 | 6.06E−19 | 5 | 5 |
| | NO: 97 | | | | | | | | |
| SCGB3A1 | SEQ ID | 0.706 | 0.711 | 0.697 | 1.02E−18 | 6.19E−17 | 6.19E−18 | 4 | 1 |
| | NO: 115 | | | | | | | | |
| THBS1 | SEQ ID | 0.722 | 0.829 | 0.56 | 1.41E−18 | 8.59E−17 | 7.81E−18 | 4 | 3 |
| | NO: 81 | | | | | | | | |
| TIMP3 | SEQ ID | 0.667 | 0.623 | 0.735 | 3.62E−18 | 2.21E−16 | 1.84E−17 | 4 | 4 |
| | NO: 103 | | | | | | | | |
| IGSF4 | SEQ ID | 0.696 | 0.713 | 0.669 | 3.23E−17 | 1.97E−15 | 1.52E−16 | 4 | 2 |
| | NO: 74 | | | | | | | | |
| CDKN1A | SEQ ID | 0.67 | 0.748 | 0.551 | 8.09E−17 | 4.93E−15 | 3.52E−16 | 4 | 1 |
| | NO: 67 | | | | | | | | |
| IGFBP7 | SEQ ID | 0.681 | 0.746 | 0.582 | 1.67E−16 | 1.02E−14 | 6.78E−16 | 5 | 3 |
| | NO: 94 | | | | | | | | |
| SYK | SEQ ID | 0.685 | 0.678 | 0.694 | 5.57E−16 | 3.40E−14 | 2.12E−15 | 4 | 3 |
| | NO: 60 | | | | | | | | |
| HIC1 | SEQ ID | 0.645 | 0.707 | 0.55 | 6.28E−16 | 3.83E−14 | 2.25E−15 | 5 | 4 |
| | NO: 85 | | | | | | | | |
| TMS1/ASC | SEQ ID | 0.673 | 0.765 | 0.533 | 2.40E−15 | 1.47E−13 | 8.15E−15 | 4 | 1 |
| | NO: 84 | | | | | | | | |
| TWIST | SEQ ID | 0.659 | 0.771 | 0.487 | 3.17E−15 | 1.93E−13 | 9.99E−15 | 4 | 3 |
| | NO: 100 | | | | | | | | |
| APAF1 | SEQ ID | 0.656 | 0.65 | 0.665 | 3.27E−15 | 2.00E−13 | 9.99E−15 | 5 | 2 |
| | NO: 82 | | | | | | | | |
| THRB | SEQ ID | 0.68 | 0.721 | 0.619 | 6.19E−15 | 3.78E−13 | 1.80E−14 | 4 | 1 |
| | NO: 106 | | | | | | | | |
| CDH13 | SEQ ID | 0.685 | 0.676 | 0.698 | 1.20E−14 | 7.33E−13 | 3.33E−14 | 4 | 3 |
| | NO: 70 | | | | | | | | |
| GJB2 | SEQ ID | 0.626 | 0.537 | 0.761 | 2.06E−14 | 1.26E−12 | 5.47E−14 | 4 | 1 |
| | NO: 111 | | | | | | | | |
| ALX4 | SEQ ID | 0.685 | 0.833 | 0.46 | 2.29E−14 | 1.40E−12 | 5.82E−14 | 4 | 3 |
| | NO: 64 | | | | | | | | |
| SERPINB5 | SEQ ID | 0.716 | 0.87 | 0.481 | 7.91E−14 | 4.82E−12 | 1.93E−13 | 3 | 3 |
| | NO: 68 | | | | | | | | |
| FABP3 | SEQ ID | 0.658 | 0.603 | 0.742 | 8.69E−13 | 5.30E−11 | 2.04E−12 | 4 | 3 |
| | NO: 77 | | | | | | | | |
| DAPK1 | SEQ ID | 0.65 | 0.764 | 0.478 | 2.40E−11 | 1.47E−09 | 5.43E−11 | 2 | 1 |
| | NO: 98 | | | | | | | | |
| FHIT | SEQ ID | 0.63 | 0.6 | 0.675 | 5.00E−11 | 3.05E−09 | 1.09E−10 | 3 | 1 |
| | NO: 76 | | | | | | | | |
| MCT1 | SEQ ID | 0.667 | 0.743 | 0.552 | 1.37E−10 | 8.33E−09 | 2.87E−10 | 4 | 3 |
| | NO: 101 | | | | | | | | |
| APC | SEQ ID | 0.595 | 0.431 | 0.844 | 6.33E−10 | 3.86E−08 | 1.29E−09 | 4 | 4 |
| | NO: 65 | | | | | | | | |
| CDKN2A | SEQ ID | 0.614 | 0.479 | 0.819 | 6.73E−10 | 4.11E−08 | 1.32E−09 | 3 | 3 |
| | NO: 57 | | | | | | | | |
| EYA4 | SEQ ID | 0.627 | 0.803 | 0.358 | 2.35E−09 | 1.43E−07 | 4.48E−09 | 4 | 1 |
| | NO: 58 | | | | | | | | |
| S100A7 | SEQ ID | 0.658 | 0.627 | 0.704 | 5.32E−09 | 3.25E−07 | 9.84E−09 | 3 | 2 |
| | NO: 96 | | | | | | | | |
| GPC3 | SEQ ID | 0.623 | 0.653 | 0.578 | 1.17E−08 | 7.11E−07 | 2.09E−08 | 4 | 1 |
| | NO: 118 | | | | | | | | |
| SLC19A1 | SEQ ID | 0.603 | 0.598 | 0.61 | 2.17E−08 | 1.32E−06 | 3.78E−08 | 3 | 2 |
| | NO: 116 | | | | | | | | |
| SOD2 | SEQ ID | 0.632 | 0.657 | 0.592 | 4.55E−08 | 2.77E−06 | 7.71E−08 | 4 | 2 |
| | NO: 105 | | | | | | | | |
| ESR2 | SEQ ID | 0.544 | 0.337 | 0.857 | 6.27E−08 | 3.82E−06 | 1.03E−07 | 4 | 1 |
| | NO: 91 | | | | | | | | |
| LOT1 | SEQ ID | 0.605 | 0.594 | 0.621 | 4.53E−07 | 2.76E−05 | 7.28E−07 | 4 | 2 |
| | NO: 95 | | | | | | | | |
| SASH1 | SEQ ID | 0.613 | 0.619 | 0.605 | 4.76E−07 | 2.90E−05 | 7.45E−07 | 4 | 2 |
| | NO: 102 | | | | | | | | |
| TGFBR2 | SEQ ID | 0.609 | 0.554 | 0.692 | 4.89E−07 | 2.98E−05 | 7.46E−07 | 4 | 1 |
| | NO: 93 | | | | | | | | |
| CLDN7 | SEQ ID | 0.622 | 0.716 | 0.48 | 1.83E−06 | 1.11E−04 | 2.72E−06 | 4 | 1 |
| | NO: 87 | | | | | | | | |
| RARA | SEQ ID | 0.564 | 0.483 | 0.686 | 5.30E−06 | 3.23E−04 | 7.70E−06 | 4 | 1 |
| | NO: 108 | | | | | | | | |
| IL6 | SEQ ID | 0.601 | 0.586 | 0.624 | 1.47E−05 | 8.98E−04 | 2.09E−05 | 4 | 0 |
| | NO: 99 | | | | | | | | |
| PRSS8 | SEQ ID | 0.558 | 0.595 | 0.502 | 3.66E−05 | 2.23E−03 | 5.07E−05 | 4 | 0 |
| | NO: 72 | | | | | | | | |
| CASP8 | SEQ ID | 0.579 | 0.53 | 0.653 | 3.98E−05 | 2.43E−03 | 5.40E−05 | 4 | 1 |
| | NO: 71 | | | | | | | | |
| SFN | SEQ ID | 0.599 | 0.677 | 0.479 | 4.24E−05 | 2.58E−03 | 5.62E−05 | 4 | 1 |
| | NO: 69 | | | | | | | | |
| RARB | SEQ ID | 0.549 | 0.474 | 0.662 | 4.61E−05 | 2.81E−03 | 5.98E−05 | 4 | 1 |
| | NO: 88 | | | | | | | | |
| NME1 | SEQ ID | 0.59 | 0.635 | 0.522 | 1.46E−04 | 8.91E−03 | 1.86E−04 | 4 | 1 |
| | NO: 107 | | | | | | | | |
| ELK1 | SEQ ID | 0.596 | 0.677 | 0.473 | 1.88E−04 | 1.15E−02 | 2.34E−04 | 5 | 0 |
| | NO: 2 | | | | | | | | |
| PGR | SEQ ID | 0.592 | 0.63 | 0.532 | 7.29E−04 | 4.44E−02 | 8.89E−04 | 4 | 0 |
| | NO: 83 | | | | | | | | |
| BRCA1 | SEQ ID | 0.543 | 0.468 | 0.658 | 4.79E−03 | 2.92E−01 | 5.72E−03 | 4 | 0 |
| | NO: 66 | | | | | | | | |
| ESR1 | SEQ ID | 0.606 | 0.654 | 0.533 | 6.06E−03 | 3.69E−01 | 7.10E−03 | 3 | 1 |
| | NO: 75 | | | | | | | | |
| STAT1 | SEQ ID | 0.583 | 0.646 | 0.488 | 9.12E−03 | 5.56E−01 | 1.05E−02 | 4 | 0 |
| | NO: 109 | | | | | | | | |
| SNCG | SEQ ID | 0.566 | 0.676 | 0.398 | 2.04E−02 | 1.00E+00 | 2.31E−02 | 4 | 0 |
| | NO: 73 | | | | | | | | |
| MLH1 | SEQ ID | 0.53 | 0.414 | 0.706 | 2.60E−02 | 1.00E+00 | 2.88E−02 | 4 | 0 |
| | NO: 89 | | | | | | | | |
| BRCA2 | SEQ ID | 0.565 | 0.567 | 0.562 | 3.43E−02 | 1.00E+00 | 3.74E−02 | 5 | 0 |
| | NO: 56 | | | | | | | | |
| TP73 | SEQ ID | 0.534 | 0.496 | 0.592 | 4.43E−02 | 1.00E+00 | 4.74E−02 | 4 | 0 |
| | NO: 86 | | | | | | | | |
| TERT | SEQ ID | 0.537 | 0.5 | 0.592 | 1.16E−01 | 1.00E+00 | 1.22E−01 | 4 | 0 |
| | NO: 92 | | | | | | | | |
| TP53 | SEQ ID | 0.513 | 0.44 | 0.625 | 2.09E−01 | 1.00E+00 | 2.16E−01 | 4 | 0 |
| | NO: 80 | | | | | | | | |
| TPM1 | SEQ ID | 0.518 | 0.405 | 0.689 | 2.35E−01 | 1.00E+00 | 2.39E−01 | 4 | 0 |
| | NO: 110 | | | | | | | | |
| CDH1 | SEQ ID | 0.482 | 0.51 | 0.44 | 6.17E−01 | 1.00E+00 | 6.17E−01 | 5 | 0 |
| | NO: 79 | | | | | | | | |

TABLE 5
Breast cancer vs. all other controls Chip 2

| SEQ ID | | | | | P-value | | | n Significant |
|---|---|---|---|---|---|---|---|---|
| NO: | Accuracy | Sensitivity | Specificity | p-value | (Bonferroni) | P-value FDR | n Oligos | oligos |
| SEQ ID | 0.773 | 0.764 | 0.786 | 1.02E−37 | 5.50E−36 | 5.50E−36 | 4 | 3 |
| NO: 12 | | | | | | | | |
| SEQ ID | 0.777 | 0.821 | 0.712 | 1.01E−32 | 5.47E−31 | 2.73E−31 | 6 | 6 |
| NO: 6 | | | | | | | | |
| SEQ ID | 0.754 | 0.73 | 0.789 | 3.11E−32 | 1.68E−30 | 5.60E−31 | 4 | 4 |
| NO: 3 | | | | | | | | |
| SEQ ID | 0.722 | 0.7 | 0.754 | 1.43E−28 | 7.72E−27 | 1.93E−27 | 5 | 5 |
| NO: 18 | | | | | | | | |
| SEQ ID | 0.753 | 0.824 | 0.65 | 2.18E−26 | 1.18E−24 | 2.36E−25 | 5 | 3 |
| NO: 7 | | | | | | | | |
| SEQ ID | 0.74 | 0.797 | 0.658 | 3.97E−26 | 2.15E−24 | 3.58E−25 | 5 | 4 |
| NO: 41 | | | | | | | | |
| SEQ ID | 0.726 | 0.677 | 0.796 | 1.87E−25 | 1.01E−23 | 1.44E−24 | 8 | 8 |
| NO: 22 | | | | | | | | |
| SEQ ID | 0.727 | 0.74 | 0.707 | 2.74E−25 | 1.48E−23 | 1.85E−24 | 4 | 4 |
| NO: 46 | | | | | | | | |
| SEQ ID | 0.681 | 0.622 | 0.767 | 6.60E−22 | 3.56E−20 | 3.96E−21 | 4 | 3 |
| NO: 13 | | | | | | | | |
| SEQ ID | 0.69 | 0.647 | 0.753 | 1.06E−21 | 5.74E−20 | 5.74E−21 | 5 | 5 |
| NO: 31 | | | | | | | | |
| SEQ ID | 0.695 | 0.684 | 0.711 | 4.06E−21 | 2.19E−19 | 1.99E−20 | 5 | 2 |
| NO: 34 | | | | | | | | |
| SEQ ID | 0.714 | 0.702 | 0.733 | 1.58E−20 | 8.52E−19 | 7.10E−20 | 4 | 3 |
| NO: 27 | | | | | | | | |
| SEQ ID | 0.697 | 0.816 | 0.521 | 3.12E−20 | 1.69E−18 | 1.30E−19 | 9 | 8 |
| NO: 10 | | | | | | | | |
| SEQ ID | 0.69 | 0.818 | 0.502 | 9.42E−20 | 5.09E−18 | 3.63E−19 | 5 | 3 |
| NO: 38 | | | | | | | | |
| SEQ ID | 0.684 | 0.745 | 0.593 | 1.06E−19 | 5.74E−18 | 3.83E−19 | 4 | 3 |
| NO: 47 | | | | | | | | |
| SEQ ID | 0.703 | 0.716 | 0.683 | 1.39E−19 | 7.49E−18 | 4.68E−19 | 4 | 4 |
| NO: 117 | | | | | | | | |
| SEQ ID | 0.723 | 0.746 | 0.69 | 1.47E−19 | 7.95E−18 | 4.68E−19 | 4 | 4 |
| NO: 48 | | | | | | | | |
| SEQ ID | 0.695 | 0.586 | 0.855 | 7.60E−19 | 4.10E−17 | 2.28E−18 | 4 | 4 |
| NO: 30 | | | | | | | | |
| SEQ ID | 0.692 | 0.641 | 0.766 | 1.66E−18 | 8.95E−17 | 4.71E−18 | 4 | 3 |
| NO: 4 | | | | | | | | |
| SEQ ID | 0.678 | 0.695 | 0.654 | 1.70E−17 | 9.16E−16 | 4.58E−17 | 4 | 4 |
| NO: 39 | | | | | | | | |
| SEQ ID | 0.683 | 0.741 | 0.598 | 1.83E−17 | 9.88E−16 | 4.70E−17 | 5 | 4 |
| NO: 1 | | | | | | | | |
| SEQ ID | 0.686 | 0.78 | 0.549 | 8.08E−16 | 4.37E−14 | 1.98E−15 | 4 | 4 |
| NO: 35 | | | | | | | | |
| SEQ ID | 0.697 | 0.687 | 0.711 | 1.66E−15 | 8.97E−14 | 3.90E−15 | 4 | 1 |
| NO: 43 | | | | | | | | |
| SEQ ID | 0.659 | 0.597 | 0.75 | 1.15E−14 | 6.21E−13 | 2.59E−14 | 5 | 2 |
| NO: 54 | | | | | | | | |
| SEQ ID | 0.657 | 0.648 | 0.67 | 3.14E−14 | 1.70E−12 | 6.79E−14 | 5 | 2 |
| NO: 25 | | | | | | | | |
| SEQ ID | 0.667 | 0.648 | 0.695 | 6.97E−14 | 3.76E−12 | 1.45E−13 | 4 | 2 |
| NO: 42 | | | | | | | | |
| SEQ ID | 0.684 | 0.727 | 0.621 | 1.53E−13 | 8.25E−12 | 3.05E−13 | 5 | 3 |
| NO: 29 | | | | | | | | |
| SEQ ID | 0.642 | 0.704 | 0.551 | 1.74E−13 | 9.38E−12 | 3.35E−13 | 4 | 1 |
| NO: 2 | | | | | | | | |
| SEQ ID | 0.631 | 0.623 | 0.643 | 4.22E−12 | 2.28E−10 | 7.85E−12 | 3 | 1 |
| NO: 32 | | | | | | | | |
| SEQ ID | 0.64 | 0.609 | 0.686 | 6.07E−12 | 3.28E−10 | 1.07E−11 | 3 | 1 |
| NO: 23 | | | | | | | | |
| SEQ ID | 0.652 | 0.64 | 0.67 | 6.12E−12 | 3.30E−10 | 1.07E−11 | 4 | 4 |
| NO: 11 | | | | | | | | |
| SEQ ID | 0.631 | 0.614 | 0.655 | 8.28E−11 | 4.47E−09 | 1.40E−10 | 5 | 2 |
| NO: 16 | | | | | | | | |
| SEQ ID | 0.643 | 0.652 | 0.631 | 1.68E−10 | 9.09E−09 | 2.75E−10 | 5 | 1 |
| NO: 17 | | | | | | | | |
| SEQ ID | 0.639 | 0.613 | 0.677 | 3.66E−10 | 1.97E−08 | 5.81E−10 | 7 | 2 |
| NO: 28 | | | | | | | | |
| SEQ ID | 0.615 | 0.524 | 0.749 | 8.46E−10 | 4.57E−08 | 1.31E−09 | 4 | 1 |
| NO: 51 | | | | | | | | |
| SEQ ID | 0.595 | 0.539 | 0.677 | 2.07E−09 | 1.12E−07 | 3.11E−09 | 4 | 1 |
| NO: 19 | | | | | | | | |
| SEQ ID | 0.626 | 0.806 | 0.363 | 2.96E−09 | 1.60E−07 | 4.32E−09 | 4 | 1 |
| NO: 20 | | | | | | | | |
| SEQ ID | 0.607 | 0.496 | 0.769 | 8.74E−09 | 4.72E−07 | 1.24E−08 | 3 | 1 |
| NO: 14 | | | | | | | | |
| SEQ ID | 0.614 | 0.505 | 0.774 | 6.78E−08 | 3.66E−06 | 9.39E−08 | 5 | 3 |
| NO: 24 | | | | | | | | |
| SEQ ID | 0.598 | 0.468 | 0.789 | 1.33E−07 | 7.20E−06 | 1.80E−07 | 3 | 0 |
| NO: 33 | | | | | | | | |
| SEQ ID | 0.599 | 0.5 | 0.743 | 2.21E−07 | 1.19E−05 | 2.90E−07 | 5 | 2 |
| NO: 50 | | | | | | | | |
| SEQ ID | 0.644 | 0.75 | 0.489 | 1.03E−06 | 5.57E−05 | 1.33E−06 | 3 | 1 |
| NO: 26 | | | | | | | | |
| SEQ ID | 0.597 | 0.668 | 0.492 | 1.15E−05 | 6.21E−04 | 1.44E−05 | 5 | 0 |
| NO: 15 | | | | | | | | |
| SEQ ID | 0.6 | 0.569 | 0.646 | 1.78E−05 | 9.59E−04 | 2.18E−05 | 5 | 1 |
| NO: 40 | | | | | | | | |
| SEQ ID | 0.582 | 0.635 | 0.504 | 2.43E−05 | 1.31E−03 | 2.91E−05 | 3 | 1 |
| NO: 37 | | | | | | | | |
| SEQ ID | 0.603 | 0.538 | 0.698 | 3.25E−05 | 1.75E−03 | 3.81E−05 | 5 | 1 |
| NO: 9 | | | | | | | | |
| SEQ ID | 0.592 | 0.613 | 0.561 | 5.90E−05 | 3.18E−03 | 6.77E−05 | 5 | 3 |
| NO: 5 | | | | | | | | |
| SEQ ID | 0.64 | 0.863 | 0.315 | 1.41E−04 | 7.61E−03 | 1.59E−04 | 5 | 0 |
| NO: 8 | | | | | | | | |
| SEQ ID | 0.606 | 0.695 | 0.475 | 1.72E−03 | 9.31E−02 | 1.90E−03 | 4 | 0 |
| NO: 52 | | | | | | | | |
| SEQ ID | 0.57 | 0.516 | 0.649 | 1.14E−02 | 6.14E−01 | 1.23E−02 | 4 | 0 |
| NO: 21 | | | | | | | | |
| SEQ ID | 0.521 | 0.54 | 0.493 | 2.59E−02 | 1.00E+00 | 2.74E−02 | 4 | 0 |
| NO: 36 | | | | | | | | |
| SEQ ID | 0.514 | 0.332 | 0.78 | 2.98E−02 | 1.00E+00 | 3.09E−02 | 5 | 0 |
| NO: 55 | | | | | | | | |
| SEQ ID | 0.553 | 0.65 | 0.411 | 6.73E−02 | 1.00E+00 | 6.86E−02 | 4 | 0 |
| NO: 45 | | | | | | | | |
| SEQ ID | 0.496 | 0.402 | 0.632 | 5.14E−01 | 1.00E+00 | 5.14E−01 | 2 | 0 |
| NO: 44 | | | | | | | | |

TABLE 6
Breast cancer vs. other cancer Chip 1

| | SEQ ID | | | | | P-value | P-value | n | n Significant |
|---|---|---|---|---|---|---|---|---|---|
| Gene Name | NO: | Accuracy | Sensitivity | Specificity | p-value | (Bonferroni) | FDR | Oligos | oligos |
| PRDM2 | SEQ ID | 0.852 | 0.897 | 0.687 | 8.85E−26 | 5.40E−24 | 5.40E−24 | 4 | 1 |
| | NO: 114 | | | | | | | | |
| GSTP1 | SEQ ID | 0.686 | 0.638 | 0.862 | 2.40E−14 | 1.47E−12 | 7.34E−13 | 4 | 4 |
| | NO: 59 | | | | | | | | |
| ALX4 | SEQ ID | 0.77 | 0.821 | 0.583 | 4.88E−14 | 2.98E−12 | 9.92E−13 | 4 | 3 |
| | NO: 64 | | | | | | | | |
| HOXA5 | SEQ ID | 0.689 | 0.683 | 0.708 | 8.11E−13 | 4.95E−11 | 1.24E−11 | 4 | 2 |
| | NO: 78 | | | | | | | | |
| PLAU | SEQ ID | 0.693 | 0.707 | 0.642 | 2.29E−12 | 1.40E−10 | 2.80E−11 | 4 | 3 |
| | NO: 62 | | | | | | | | |
| RASSF1A | SEQ ID | 0.714 | 0.721 | 0.689 | 1.10E−10 | 6.68E−09 | 1.11E−09 | 3 | 3 |
| | NO: 90 | | | | | | | | |
| IGSF4 | SEQ ID | 0.716 | 0.735 | 0.644 | 2.13E−10 | 1.30E−08 | 1.86E−09 | 4 | 1 |
| | NO: 74 | | | | | | | | |
| SLIT2 | SEQ ID | 0.674 | 0.726 | 0.479 | 5.43E−10 | 3.31E−08 | 4.14E−09 | 4 | 2 |
| | NO: 112 | | | | | | | | |
| DAPK1 | SEQ ID | 0.713 | 0.757 | 0.549 | 1.05E−09 | 6.41E−08 | 7.13E−09 | 2 | 1 |
| | NO: 98 | | | | | | | | |
| CDKN1A | SEQ ID | 0.693 | 0.725 | 0.576 | 1.34E−09 | 8.17E−08 | 8.17E−09 | 4 | 1 |
| | NO: 67 | | | | | | | | |
| IGFBP7 | SEQ ID | 0.7 | 0.702 | 0.693 | 2.79E−09 | 1.70E−07 | 1.55E−08 | 5 | 3 |
| | NO: 94 | | | | | | | | |
| THBS1 | SEQ ID | 0.735 | 0.791 | 0.528 | 4.76E−09 | 2.90E−07 | 2.42E−08 | 4 | 3 |
| | NO: 81 | | | | | | | | |
| CCND2 | SEQ ID | 0.688 | 0.707 | 0.617 | 3.74E−08 | 2.28E−06 | 1.75E−07 | 6 | 2 |
| | NO: 104 | | | | | | | | |
| APAF1 | SEQ ID | 0.631 | 0.632 | 0.628 | 1.20E−07 | 7.34E−06 | 5.25E−07 | 5 | 2 |
| | NO: 82 | | | | | | | | |
| EYA4 | SEQ ID | 0.719 | 0.748 | 0.613 | 1.82E−07 | 1.11E−05 | 7.40E−07 | 4 | 2 |
| | NO: 58 | | | | | | | | |
| SCGB3A1 | SEQ ID | 0.649 | 0.671 | 0.568 | 2.56E−07 | 1.56E−05 | 9.25E−07 | 4 | 1 |
| | NO: 115 | | | | | | | | |
| SYK | SEQ ID | 0.647 | 0.653 | 0.625 | 2.65E−07 | 1.62E−05 | 9.25E−07 | 4 | 2 |
| | NO: 60 | | | | | | | | |
| HIC1 | SEQ ID | 0.654 | 0.69 | 0.524 | 2.73E−07 | 1.67E−05 | 9.25E−07 | 5 | 2 |
| | NO: 85 | | | | | | | | |
| CDH13 | SEQ ID | 0.573 | 0.503 | 0.831 | 3.52E−07 | 2.15E−05 | 1.13E−06 | 4 | 0 |
| | NO: 70 | | | | | | | | |
| TIMP3 | SEQ ID | 0.619 | 0.617 | 0.627 | 1.45E−06 | 8.84E−05 | 4.42E−06 | 4 | 3 |
| | NO: 103 | | | | | | | | |
| LOT1 | SEQ ID | 0.632 | 0.626 | 0.652 | 1.57E−06 | 9.56E−05 | 4.55E−06 | 4 | 1 |
| | NO: 95 | | | | | | | | |
| THRB | SEQ ID | 0.723 | 0.776 | 0.53 | 1.89E−06 | 1.15E−04 | 5.24E−06 | 4 | 1 |
| | NO: 106 | | | | | | | | |
| TMS1/ASC | SEQ ID | 0.702 | 0.781 | 0.411 | 2.77E−06 | 1.69E−04 | 7.34E−06 | 4 | 1 |
| | NO: 84 | | | | | | | | |
| IL6 | SEQ ID | 0.654 | 0.669 | 0.596 | 1.69E−05 | 1.03E−03 | 4.30E−05 | 4 | 1 |
| | NO: 99 | | | | | | | | |
| TWIST | SEQ ID | 0.696 | 0.755 | 0.479 | 1.92E−05 | 1.17E−03 | 4.69E−05 | 4 | 2 |
| | NO: 100 | | | | | | | | |
| CLDN7 | SEQ ID | 0.63 | 0.67 | 0.482 | 3.67E−04 | 2.24E−02 | 8.62E−04 | 4 | 0 |
| | NO: 87 | | | | | | | | |
| FHIT | SEQ ID | 0.601 | 0.613 | 0.556 | 7.43E−04 | 4.53E−02 | 1.63E−03 | 3 | 0 |
| | NO: 76 | | | | | | | | |
| ARH1/NOEY2 | SEQ ID | 0.634 | 0.646 | 0.587 | 7.50E−04 | 4.57E−02 | 1.63E−03 | 5 | 2 |
| | NO: 97 | | | | | | | | |
| PGR | SEQ ID | 0.649 | 0.642 | 0.673 | 1.34E−03 | 8.17E−02 | 2.82E−03 | 4 | 0 |
| | NO: 83 | | | | | | | | |
| NME1 | SEQ ID | 0.588 | 0.597 | 0.556 | 2.10E−03 | 1.28E−01 | 4.27E−03 | 4 | 1 |
| | NO: 107 | | | | | | | | |
| SERPINB5 | SEQ ID | 0.665 | 0.709 | 0.503 | 3.24E−03 | 1.98E−01 | 6.38E−03 | 3 | 0 |
| | NO: 68 | | | | | | | | |
| GPC3 | SEQ ID | 0.619 | 0.651 | 0.503 | 3.42E−03 | 2.09E−01 | 6.52E−03 | 4 | 0 |
| | NO: 118 | | | | | | | | |
| ESR2 | SEQ ID | 0.395 | 0.267 | 0.869 | 3.53E−03 | 2.15E−01 | 6.53E−03 | 4 | 0 |
| | NO: 91 | | | | | | | | |
| MCT1 | SEQ ID | 0.713 | 0.818 | 0.321 | 9.75E−03 | 5.95E−01 | 1.75E−02 | 4 | 0 |
| | NO: 101 | | | | | | | | |
| HS3ST2 | SEQ ID | 0.749 | 0.892 | 0.22 | 1.07E−02 | 6.54E−01 | 1.84E−02 | 2 | 0 |
| | NO: 113 | | | | | | | | |
| GJB2 | SEQ ID | 0.543 | 0.516 | 0.642 | 1.08E−02 | 6.62E−01 | 1.84E−02 | 4 | 0 |
| | NO: 111 | | | | | | | | |
| ELK1 | SEQ ID | 0.603 | 0.634 | 0.49 | 2.21E−02 | 1.00E+00 | 3.61E−02 | 5 | 0 |
| | NO: 2 | | | | | | | | |
| STAT1 | SEQ ID | 0.618 | 0.651 | 0.496 | 2.25E−02 | 1.00E+00 | 3.61E−02 | 4 | 0 |
| | NO: 109 | | | | | | | | |
| TGFBR2 | SEQ ID | 0.608 | 0.669 | 0.382 | 2.34E−02 | 1.00E+00 | 3.66E−02 | 4 | 0 |
| | NO: 93 | | | | | | | | |
| TERT | SEQ ID | 0.552 | 0.549 | 0.566 | 2.41E−02 | 1.00E+00 | 3.67E−02 | 4 | 0 |
| | NO: 92 | | | | | | | | |
| PRSS8 | SEQ ID | 0.578 | 0.592 | 0.525 | 4.66E−02 | 1.00E+00 | 6.93E−02 | 4 | 0 |
| | NO: 72 | | | | | | | | |
| SOD2 | SEQ ID | 0.587 | 0.602 | 0.534 | 6.76E−02 | 1.00E+00 | 9.82E−02 | 4 | 0 |
| | NO: 105 | | | | | | | | |
| S100A7 | SEQ ID | 0.568 | 0.594 | 0.47 | 7.29E−02 | 1.00E+00 | 1.03E−01 | 3 | 0 |
| | NO: 96 | | | | | | | | |
| FABP3 | SEQ ID | 0.504 | 0.466 | 0.648 | 7.78E−02 | 1.00E+00 | 1.08E−01 | 4 | 0 |
| | NO: 77 | | | | | | | | |
| SFN | SEQ ID | 0.597 | 0.637 | 0.448 | 8.88E−02 | 1.00E+00 | 1.18E−01 | 4 | 0 |
| | NO: 69 | | | | | | | | |
| RARA | SEQ ID | 0.442 | 0.369 | 0.711 | 8.97E−02 | 1.00E+00 | 1.18E−01 | 4 | 0 |
| | NO: 108 | | | | | | | | |
| CDH1 | SEQ ID | 0.539 | 0.559 | 0.463 | 9.06E−02 | 1.00E+00 | 1.18E−01 | 5 | 0 |
| | NO: 79 | | | | | | | | |
| APC | SEQ ID | 0.578 | 0.605 | 0.476 | 1.21E−01 | 1.00E+00 | 1.54E−01 | 4 | 0 |
| | NO: 65 | | | | | | | | |
| BRCA2 | SEQ ID | 0.577 | 0.585 | 0.546 | 1.26E−01 | 1.00E+00 | 1.57E−01 | 5 | 0 |
| | NO: 56 | | | | | | | | |
| SASH1 | SEQ ID | 0.548 | 0.553 | 0.53 | 1.58E−01 | 1.00E+00 | 1.93E−01 | 4 | 0 |
| | NO: 102 | | | | | | | | |
| CASP8 | SEQ ID | 0.534 | 0.533 | 0.534 | 1.63E−01 | 1.00E+00 | 1.95E−01 | 4 | 0 |
| | NO: 71 | | | | | | | | |
| CDKN2A | SEQ ID | 0.487 | 0.448 | 0.632 | 1.74E−01 | 1.00E+00 | 2.04E−01 | 3 | 0 |
| | NO: 57 | | | | | | | | |
| ESR1 | SEQ ID | 0.602 | 0.654 | 0.408 | 2.14E−01 | 1.00E+00 | 2.47E−01 | 3 | 0 |
| | NO: 75 | | | | | | | | |
| RARB | SEQ ID | 0.577 | 0.622 | 0.413 | 2.61E−01 | 1.00E+00 | 2.95E−01 | 4 | 0 |
| | NO: 88 | | | | | | | | |
| SNCG | SEQ ID | 0.573 | 0.635 | 0.342 | 3.53E−01 | 1.00E+00 | 3.92E−01 | 4 | 0 |
| | NO: 73 | | | | | | | | |
| BRCA1 | SEQ ID | 0.421 | 0.362 | 0.642 | 3.69E−01 | 1.00E+00 | 4.02E−01 | 4 | 0 |
| | NO: 66 | | | | | | | | |
| SLC19A1 | SEQ ID | 0.455 | 0.437 | 0.523 | 4.30E−01 | 1.00E+00 | 4.60E−01 | 3 | 0 |
| | NO: 116 | | | | | | | | |
| TP73 | SEQ ID | 0.484 | 0.463 | 0.559 | 5.24E−01 | 1.00E+00 | 5.51E−01 | 4 | 0 |
| | NO: 86 | | | | | | | | |
| TP53 | SEQ ID | 0.472 | 0.463 | 0.503 | 6.77E−01 | 1.00E+00 | 7.00E−01 | 4 | 0 |
| | NO: 80 | | | | | | | | |
| MLH1 | SEQ ID | 0.56 | 0.621 | 0.332 | 7.29E−01 | 1.00E+00 | 7.42E−01 | 4 | 0 |
| | NO: 89 | | | | | | | | |
| TPM1 | SEQ ID | 0.514 | 0.554 | 0.369 | 8.30E−01 | 1.00E+00 | 8.30E−01 | 4 | 0 |
| | NO: 110 | | | | | | | | |

TABLE 7
Breast cancer vs. other cancer Chip 2

| SEQ ID | | | | | P-value | P-value | | n Significant |
|---|---|---|---|---|---|---|---|---|
| NO: | Accuracy | Sensitivity | Specificity | P-value | (Bonferroni) | FDR | n Oligos | oligos |
| SEQ ID | 0.75 | 0.775 | 0.662 | 1.91E−14 | 1.03E−12 | 1.03E−12 | 5 | 4 |
| NO: 38 | | | | | | | | |
| SEQ ID | 0.73 | 0.771 | 0.592 | 5.32E−13 | 2.87E−11 | 1.44E−11 | 4 | 4 |
| NO: 35 | | | | | | | | |
| SEQ ID | 0.74 | 0.784 | 0.577 | 5.86E−12 | 3.17E−10 | 1.01E−10 | 4 | 3 |
| NO: 12 | | | | | | | | |
| SEQ ID | 0.71 | 0.733 | 0.626 | 7.49E−12 | 4.05E−10 | 1.01E−10 | 4 | 4 |
| NO: 39 | | | | | | | | |
| SEQ ID | 0.79 | 0.886 | 0.455 | 9.63E−11 | 5.20E−09 | 1.04E−09 | 9 | 5 |
| NO: 10 | | | | | | | | |
| SEQ ID | 0.74 | 0.773 | 0.623 | 1.88E−10 | 1.01E−08 | 1.69E−09 | 3 | 3 |
| NO: 26 | | | | | | | | |
| SEQ ID | 0.64 | 0.616 | 0.716 | 2.30E−10 | 1.24E−08 | 1.77E−09 | 5 | 5 |
| NO: 8 | | | | | | | | |
| SEQ ID | 0.69 | 0.692 | 0.681 | 6.56E−10 | 3.54E−08 | 4.43E−09 | 8 | 6 |
| NO: 22 | | | | | | | | |
| SEQ ID | 0.67 | 0.664 | 0.692 | 1.53E−09 | 8.24E−08 | 9.15E−09 | 5 | 2 |
| NO: 18 | | | | | | | | |
| SEQ ID | 0.73 | 0.788 | 0.534 | 4.22E−09 | 2.28E−07 | 2.22E−08 | 4 | 1 |
| NO: 47 | | | | | | | | |
| SEQ ID | 0.73 | 0.745 | 0.677 | 4.53E−09 | 2.44E−07 | 2.22E−08 | 5 | 3 |
| NO: 5 | | | | | | | | |
| SEQ ID | 0.65 | 0.642 | 0.666 | 6.75E−09 | 3.65E−07 | 3.04E−08 | 4 | 2 |
| NO: 3 | | | | | | | | |
| SEQ ID | 0.67 | 0.69 | 0.578 | 1.35E−08 | 7.29E−07 | 5.61E−08 | 5 | 2 |
| NO: 1 | | | | | | | | |
| SEQ ID | 0.68 | 0.726 | 0.523 | 1.25E−06 | 6.76E−05 | 4.83E−06 | 6 | 2 |
| NO: 6 | | | | | | | | |
| SEQ ID | 0.72 | 0.744 | 0.656 | 1.44E−06 | 7.76E−05 | 5.17E−06 | 5 | 1 |
| NO: 41 | | | | | | | | |
| SEQ ID | 0.66 | 0.677 | 0.581 | 3.97E−06 | 2.15E−04 | 1.34E−05 | 3 | 1 |
| NO: 33 | | | | | | | | |
| SEQ ID | 0.59 | 0.573 | 0.64 | 1.19E−05 | 6.44E−04 | 3.79E−05 | 4 | 2 |
| NO: 13 | | | | | | | | |
| SEQ ID | 0.65 | 0.716 | 0.438 | 1.62E−05 | 8.72E−04 | 4.85E−05 | 4 | 0 |
| NO: 2 | | | | | | | | |
| SEQ ID | 0.63 | 0.628 | 0.629 | 1.72E−05 | 9.26E−04 | 4.88E−05 | 5 | 1 |
| NO: 25 | | | | | | | | |
| SEQ ID | 0.61 | 0.578 | 0.704 | 3.32E−05 | 1.79E−03 | 8.95E−05 | 5 | 1 |
| NO: 54 | | | | | | | | |
| SEQ ID | 0.59 | 0.55 | 0.725 | 1.21E−04 | 6.55E−03 | 3.12E−04 | 4 | 4 |
| NO: 30 | | | | | | | | |
| SEQ ID | 0.65 | 0.659 | 0.596 | 1.37E−04 | 7.39E−03 | 3.36E−04 | 3 | 1 |
| NO: 32 | | | | | | | | |
| SEQ ID | 0.59 | 0.578 | 0.642 | 1.44E−04 | 7.75E−03 | 3.37E−04 | 5 | 1 |
| NO: 31 | | | | | | | | |
| SEQ ID | 0.6 | 0.6 | 0.614 | 1.89E−04 | 1.02E−02 | 4.26E−04 | 3 | 0 |
| NO: 23 | | | | | | | | |
| SEQ ID | 0.66 | 0.682 | 0.56 | 7.24E−04 | 3.91E−02 | 1.56E−03 | 5 | 0 |
| NO: 34 | | | | | | | | |
| SEQ ID | 0.69 | 0.746 | 0.501 | 9.60E−04 | 5.18E−02 | 1.99E−03 | 4 | 1 |
| NO: 48 | | | | | | | | |
| SEQ ID | 0.62 | 0.631 | 0.563 | 1.38E−03 | 7.44E−02 | 2.76E−03 | 4 | 0 |
| NO: 27 | | | | | | | | |
| SEQ ID | 0.59 | 0.572 | 0.652 | 1.84E−03 | 9.95E−02 | 3.55E−03 | 7 | 1 |
| NO: 28 | | | | | | | | |
| SEQ ID | 0.61 | 0.648 | 0.456 | 2.91E−03 | 1.57E−01 | 5.42E−03 | 5 | 0 |
| NO: 7 | | | | | | | | |
| SEQ ID | 0.63 | 0.676 | 0.449 | 3.05E−03 | 1.65E−01 | 5.49E−03 | 4 | 0 |
| NO: 42 | | | | | | | | |
| SEQ ID | 0.59 | 0.6 | 0.555 | 3.41E−03 | 1.84E−01 | 5.94E−03 | 3 | 0 |
| NO: 37 | | | | | | | | |
| SEQ ID | 0.55 | 0.544 | 0.548 | 6.25E−03 | 3.37E−01 | 1.05E−02 | 4 | 0 |
| NO: 19 | | | | | | | | |
| SEQ ID | 0.54 | 0.526 | 0.592 | 6.73E−03 | 3.63E−01 | 1.10E−02 | 4 | 0 |
| NO: 46 | | | | | | | | |
| SEQ ID | 0.59 | 0.635 | 0.415 | 7.70E−03 | 4.16E−01 | 1.22E−02 | 5 | 0 |
| NO: 29 | | | | | | | | |
| SEQ ID | 0.6 | 0.63 | 0.477 | 7.88E−03 | 4.26E−01 | 1.22E−02 | 4 | 0 |
| NO: 20 | | | | | | | | |
| SEQ ID | 0.61 | 0.635 | 0.523 | 8.17E−03 | 4.41E−01 | 1.23E−02 | 5 | 0 |
| NO: 17 | | | | | | | | |
| SEQ ID | 0.58 | 0.584 | 0.56 | 9.05E−03 | 4.89E−01 | 1.32E−02 | 5 | 0 |
| NO: 16 | | | | | | | | |
| SEQ ID | 0.62 | 0.655 | 0.515 | 1.27E−02 | 6.88E−01 | 1.81E−02 | 4 | 0 |
| NO: 45 | | | | | | | | |
| SEQ ID | 0.55 | 0.523 | 0.632 | 2.94E−02 | 1.00E+00 | 4.07E−02 | 4 | 0 |
| NO: 4 | | | | | | | | |
| SEQ ID | 0.48 | 0.411 | 0.73 | 3.58E−02 | 1.00E+00 | 4.83E−02 | 3 | 0 |
| NO: 14 | | | | | | | | |
| SEQ ID | 0.56 | 0.564 | 0.552 | 3.73E−02 | 1.00E+00 | 4.91E−02 | 5 | 0 |
| NO: 15 | | | | | | | | |
| SEQ ID | 0.54 | 0.525 | 0.581 | 4.70E−02 | 1.00E+00 | 6.04E−02 | 4 | 0 |
| NO: 43 | | | | | | | | |
| SEQ ID | 0.54 | 0.564 | 0.467 | 7.94E−02 | 1.00E+00 | 9.97E−02 | 5 | 0 |
| NO: 40 | | | | | | | | |
| SEQ ID | 0.56 | 0.596 | 0.438 | 1.26E−01 | 1.00E+00 | 1.54E−01 | 4 | 0 |
| NO: 11 | | | | | | | | |
| SEQ ID | 0.56 | 0.591 | 0.473 | 1.32E−01 | 1.00E+00 | 1.58E−01 | 5 | 0 |
| NO: 9 | | | | | | | | |
| SEQ ID | 0.54 | 0.558 | 0.471 | 1.42E−01 | 1.00E+00 | 1.66E−01 | 4 | 0 |
| NO: 36 | | | | | | | | |
| SEQ ID | 0.54 | 0.526 | 0.568 | 1.46E−01 | 1.00E+00 | 1.68E−01 | 4 | 0 |
| NO: 117 | | | | | | | | |
| SEQ ID | 0.55 | 0.568 | 0.473 | 3.06E−01 | 1.00E+00 | 3.45E−01 | 5 | 0 |
| NO: 55 | | | | | | | | |
| SEQ ID | 0.55 | 0.586 | 0.408 | 3.77E−01 | 1.00E+00 | 4.15E−01 | 4 | 0 |
| NO: 51 | | | | | | | | |
| SEQ ID | 0.47 | 0.437 | 0.574 | 4.14E−01 | 1.00E+00 | 4.47E−01 | 5 | 0 |
| NO: 50 | | | | | | | | |
| SEQ ID | 0.48 | 0.451 | 0.59 | 4.40E−01 | 1.00E+00 | 4.66E−01 | 4 | 0 |
| NO: 21 | | | | | | | | |
| SEQ ID | 0.48 | 0.421 | 0.663 | 4.94E−01 | 1.00E+00 | 5.13E−01 | 5 | 0 |
| NO: 24 | | | | | | | | |
| SEQ ID | 0.48 | 0.448 | 0.589 | 5.90E−01 | 1.00E+00 | 6.01E−01 | 4 | 0 |
| NO: 52 | | | | | | | | |
| SEQ ID | 0.56 | 0.618 | 0.344 | 9.16E−01 | 1.00E+00 | 9.16E−01 | 2 | 0 |
| NO: 44 | | | | | | | | |

TABLE 8
Breast cancer vs. lymphocytes Chip 1

| | | | | | | | | | n |
|---|---|---|---|---|---|---|---|---|---|
| | SEQ ID | | | | | P-value | P-value | n | Significant |
| Gene Name | NO: | Accuracy | Sensitivity | Specificity | p-value | (Bonferroni) | FDR | Oligos | oligos |
| EYA4 | SEQ ID | 1 | 1 | 1 | 9.16E−39 | 5.59E−37 | 3.76E−37 | 4 | 4 |
| | NO: 58 | | | | | | | | |
| PRDM2 | SEQ ID | 0.984 | 0.985 | 0.971 | 1.23E−38 | 7.52E−37 | 3.76E−37 | 4 | 4 |
| | NO: 114 | | | | | | | | |
| SERPINB5 | SEQ ID | 0.986 | 0.984 | 0.996 | 3.96E−37 | 2.42E−35 | 8.05E−36 | 3 | 3 |
| | NO: 68 | | | | | | | | |
| TWIST | SEQ ID | 0.962 | 0.962 | 0.964 | 8.80E−34 | 5.37E−32 | 1.34E−32 | 4 | 4 |
| | NO: 100 | | | | | | | | |
| STAT1 | SEQ ID | 0.97 | 0.973 | 0.936 | 9.90E−32 | 6.04E−30 | 1.21E−30 | 4 | 1 |
| | NO: 109 | | | | | | | | |
| ALX4 | SEQ ID | 0.949 | 0.953 | 0.911 | 2.21E−31 | 1.35E−29 | 2.24E−30 | 4 | 3 |
| | NO: 64 | | | | | | | | |
| IGFBP7 | SEQ ID | 0.941 | 0.941 | 0.939 | 1.24E−28 | 7.58E−27 | 1.08E−27 | 5 | 4 |
| | NO: 94 | | | | | | | | |
| DAPK1 | SEQ ID | 0.905 | 0.9 | 0.954 | 3.26E−26 | 1.99E−24 | 2.49E−25 | 2 | 1 |
| | NO: 98 | | | | | | | | |
| THBS1 | SEQ ID | 0.93 | 0.934 | 0.889 | 2.02E−25 | 1.23E−23 | 1.37E−24 | 4 | 2 |
| | NO: 81 | | | | | | | | |
| PLAU | SEQ ID | 0.923 | 0.927 | 0.882 | 3.43E−24 | 2.09E−22 | 2.09E−23 | 4 | 3 |
| | NO: 62 | | | | | | | | |
| PRSS8 | SEQ ID | 0.871 | 0.881 | 0.775 | 2.25E−22 | 1.37E−20 | 1.25E−21 | 4 | 2 |
| | NO: 72 | | | | | | | | |
| S100A7 | SEQ ID | 0.886 | 0.879 | 0.95 | 3.83E−21 | 2.34E−19 | 1.95E−20 | 3 | 3 |
| | NO: 96 | | | | | | | | |
| SFN | SEQ ID | 0.88 | 0.882 | 0.861 | 9.22E−20 | 5.62E−18 | 4.33E−19 | 4 | 3 |
| | NO: 69 | | | | | | | | |
| NME1 | SEQ ID | 0.807 | 0.802 | 0.854 | 1.53E−18 | 9.34E−17 | 6.67E−18 | 4 | 4 |
| | NO: 107 | | | | | | | | |
| SLIT2 | SEQ ID | 0.848 | 0.847 | 0.854 | 1.76E−18 | 1.08E−16 | 7.17E−18 | 4 | 4 |
| | NO: 112 | | | | | | | | |
| CDKN1A | SEQ ID | 0.877 | 0.881 | 0.846 | 5.07E−18 | 3.09E−16 | 1.93E−17 | 4 | 1 |
| | NO: 67 | | | | | | | | |
| LOT1 | SEQ ID | 0.819 | 0.819 | 0.818 | 8.85E−17 | 5.40E−15 | 3.18E−16 | 4 | 3 |
| | NO: 95 | | | | | | | | |
| HOXA5 | SEQ ID | 0.808 | 0.807 | 0.821 | 4.95E−16 | 3.02E−14 | 1.68E−15 | 4 | 2 |
| | NO: 78 | | | | | | | | |
| CCND2 | SEQ ID | 0.822 | 0.822 | 0.825 | 7.82E−15 | 4.77E−13 | 2.51E−14 | 6 | 4 |
| | NO: 104 | | | | | | | | |
| IGSF4 | SEQ ID | 0.864 | 0.878 | 0.732 | 3.82E−14 | 2.33E−12 | 1.17E−13 | 4 | 1 |
| | NO: 74 | | | | | | | | |
| SCGB3A1 | SEQ ID | 0.807 | 0.798 | 0.886 | 4.11E−14 | 2.51E−12 | 1.19E−13 | 4 | 2 |
| | NO: 115 | | | | | | | | |
| RASSF1A | SEQ ID | 0.759 | 0.74 | 0.939 | 4.74E−14 | 2.89E−12 | 1.31E−13 | 3 | 3 |
| | NO: 90 | | | | | | | | |
| HIC1 | SEQ ID | 0.856 | 0.867 | 0.754 | 5.66E−14 | 3.45E−12 | 1.50E−13 | 5 | 4 |
| | NO: 85 | | | | | | | | |
| GPC3 | SEQ ID | 0.771 | 0.768 | 0.793 | 1.27E−13 | 7.76E−12 | 3.23E−13 | 4 | 1 |
| | NO: 118 | | | | | | | | |
| SNCG | SEQ ID | 0.793 | 0.781 | 0.914 | 7.47E−13 | 4.56E−11 | 1.82E−12 | 4 | 4 |
| | NO: 73 | | | | | | | | |
| APC | SEQ ID | 0.769 | 0.761 | 0.846 | 8.49E−13 | 5.18E−11 | 1.99E−12 | 4 | 3 |
| | NO: 65 | | | | | | | | |
| GSTP1 | SEQ ID | 0.747 | 0.738 | 0.832 | 3.71E−12 | 2.26E−10 | 8.38E−12 | 4 | 3 |
| | NO: 59 | | | | | | | | |
| MCT1 | SEQ ID | 0.819 | 0.817 | 0.832 | 5.61E−12 | 3.42E−10 | 1.22E−11 | 4 | 2 |
| | NO: 101 | | | | | | | | |
| SLC19A1 | SEQ ID | 0.754 | 0.756 | 0.736 | 9.04E−12 | 5.52E−10 | 1.90E−11 | 3 | 2 |
| | NO: 116 | | | | | | | | |
| IL6 | SEQ ID | 0.807 | 0.81 | 0.786 | 1.08E−11 | 6.57E−10 | 2.19E−11 | 4 | 1 |
| | NO: 99 | | | | | | | | |
| HS3ST2 | SEQ ID | 0.776 | 0.774 | 0.793 | 5.22E−11 | 3.18E−09 | 1.03E−10 | 2 | 2 |
| | NO: 113 | | | | | | | | |
| FABP3 | SEQ ID | 0.753 | 0.752 | 0.761 | 1.73E−10 | 1.06E−08 | 3.30E−10 | 4 | 2 |
| | NO: 77 | | | | | | | | |
| SOD2 | SEQ ID | 0.777 | 0.787 | 0.686 | 5.83E−09 | 3.56E−07 | 1.08E−08 | 4 | 1 |
| | NO: 105 | | | | | | | | |
| THRB | SEQ ID | 0.797 | 0.824 | 0.539 | 2.75E−08 | 1.67E−06 | 4.93E−08 | 4 | 1 |
| | NO: 106 | | | | | | | | |
| CDH13 | SEQ ID | 0.701 | 0.689 | 0.821 | 3.44E−08 | 2.10E−06 | 5.99E−08 | 4 | 4 |
| | NO: 70 | | | | | | | | |
| GJB2 | SEQ ID | 0.633 | 0.612 | 0.825 | 4.24E−08 | 2.58E−06 | 7.18E−08 | 4 | 1 |
| | NO: 111 | | | | | | | | |
| APAF1 | SEQ ID | 0.723 | 0.725 | 0.696 | 6.25E−08 | 3.81E−06 | 1.03E−07 | 5 | 1 |
| | NO: 82 | | | | | | | | |
| CLDN7 | SEQ ID | 0.728 | 0.73 | 0.704 | 1.66E−06 | 1.01E−04 | 2.66E−06 | 4 | 1 |
| | NO: 87 | | | | | | | | |
| ARH1/NOEY2 | SEQ ID | 0.713 | 0.699 | 0.843 | 2.18E−06 | 1.33E−04 | 3.41E−06 | 5 | 3 |
| | NO: 97 | | | | | | | | |
| SYK | SEQ ID | 0.712 | 0.705 | 0.771 | 4.91E−06 | 2.99E−04 | 7.48E−06 | 4 | 2 |
| | NO: 60 | | | | | | | | |
| ESR1 | SEQ ID | 0.686 | 0.672 | 0.821 | 5.17E−06 | 3.15E−04 | 7.69E−06 | 3 | 1 |
| | NO: 75 | | | | | | | | |
| ELK1 | SEQ ID | 0.848 | 0.907 | 0.296 | 6.48E−06 | 3.95E−04 | 9.41E−06 | 5 | 0 |
| | NO: 2 | | | | | | | | |
| PGR | SEQ ID | 0.757 | 0.77 | 0.632 | 9.28E−06 | 5.66E−04 | 1.32E−05 | 4 | 1 |
| | NO: 83 | | | | | | | | |
| FHIT | SEQ ID | 0.665 | 0.663 | 0.686 | 3.60E−05 | 2.19E−03 | 4.99E−05 | 3 | 0 |
| | NO: 76 | | | | | | | | |
| TGFBR2 | SEQ ID | 0.634 | 0.634 | 0.639 | 4.05E−05 | 2.47E−03 | 5.49E−05 | 4 | 1 |
| | NO: 93 | | | | | | | | |
| TIMP3 | SEQ ID | 0.737 | 0.738 | 0.729 | 8.00E−05 | 4.88E−03 | 1.06E−04 | 4 | 1 |
| | NO: 103 | | | | | | | | |
| TERT | SEQ ID | 0.626 | 0.615 | 0.725 | 9.27E−05 | 5.66E−03 | 1.20E−04 | 4 | 0 |
| | NO: 92 | | | | | | | | |
| TMS1/ASC | SEQ ID | 0.746 | 0.777 | 0.454 | 2.42E−04 | 1.48E−02 | 3.08E−04 | 4 | 1 |
| | NO: 84 | | | | | | | | |
| CDKN2A | SEQ ID | 0.718 | 0.714 | 0.761 | 7.51E−04 | 4.58E−02 | 9.35E−04 | 3 | 2 |
| | NO: 57 | | | | | | | | |
| SASH1 | SEQ ID | 0.61 | 0.601 | 0.7 | 2.93E−03 | 1.79E−01 | 3.57E−03 | 4 | 0 |
| | NO: 102 | | | | | | | | |
| BRCA1 | SEQ ID | 0.602 | 0.603 | 0.589 | 3.54E−03 | 2.16E−01 | 4.23E−03 | 4 | 0 |
| | NO: 66 | | | | | | | | |
| CASP8 | SEQ ID | 0.678 | 0.685 | 0.607 | 5.31E−03 | 3.24E−01 | 6.23E−03 | 4 | 0 |
| | NO: 71 | | | | | | | | |
| CDH1 | SEQ ID | 0.653 | 0.649 | 0.689 | 6.12E−03 | 3.73E−01 | 7.04E−03 | 5 | 0 |
| | NO: 79 | | | | | | | | |
| RARB | SEQ ID | 0.493 | 0.471 | 0.704 | 1.43E−02 | 8.73E−01 | 1.62E−02 | 4 | 0 |
| | NO: 88 | | | | | | | | |
| ESR2 | SEQ ID | 0.504 | 0.484 | 0.7 | 1.79E−02 | 1.00E+00 | 1.99E−02 | 4 | 0 |
| | NO: 91 | | | | | | | | |
| TPM1 | SEQ ID | 0.556 | 0.538 | 0.718 | 1.30E−01 | 1.00E+00 | 1.42E−01 | 4 | 0 |
| | NO: 110 | | | | | | | | |
| RARA | SEQ ID | 0.498 | 0.498 | 0.5 | 1.44E−01 | 1.00E+00 | 1.55E−01 | 4 | 0 |
| | NO: 108 | | | | | | | | |
| TP73 | SEQ ID | 0.521 | 0.524 | 0.489 | 3.04E−01 | 1.00E+00 | 3.20E−01 | 4 | 0 |
| | NO: 86 | | | | | | | | |
| BRCA2 | SEQ ID | 0.611 | 0.636 | 0.375 | 3.85E−01 | 1.00E+00 | 3.98E−01 | 5 | 0 |
| | NO: 56 | | | | | | | | |
| TP53 | SEQ ID | 0.583 | 0.6 | 0.425 | 3.95E−01 | 1.00E+00 | 3.98E−01 | 4 | 0 |
| | NO: 80 | | | | | | | | |
| MLH1 | SEQ ID | 0.471 | 0.467 | 0.507 | 3.98E−01 | 1.00E+00 | 3.98E−01 | 4 | 0 |
| | NO: 89 | | | | | | | | |

TABLE 9
Breast cancer vs. lymphocytes Chip 2

| SEQ ID | | | | | P-value | P-value | | n Significant |
|---|---|---|---|---|---|---|---|---|
| NO: | Accuracy | Sensitivity | Specificity | P-value | (Bonferroni) | FDR | n Oligos | oligos |
| SEQ ID | 0.997 | 0.998 | 0.985 | 3.34E−44 | 1.81E−42 | 1.81E−42 | 4 | 4 |
| NO: 20 | | | | | | | | |
| SEQ ID | 0.992 | 0.997 | 0.953 | 2.65E−43 | 1.43E−41 | 7.16E−42 | 5 | 4 |
| NO: 38 | | | | | | | | |
| SEQ ID | 0.981 | 0.985 | 0.95 | 1.18E−42 | 6.39E−41 | 1.86E−41 | 5 | 4 |
| NO: 8 | | | | | | | | |
| SEQ ID | 0.992 | 0.995 | 0.976 | 1.38E−42 | 7.45E−41 | 1.86E−41 | 3 | 3 |
| NO: 37 | | | | | | | | |
| SEQ ID | 0.977 | 0.986 | 0.909 | 4.54E−40 | 2.45E−38 | 4.91E−39 | 9 | 8 |
| NO: 10 | | | | | | | | |
| SEQ ID | 0.964 | 0.97 | 0.926 | 1.48E−37 | 7.98E−36 | 1.33E−36 | 4 | 4 |
| NO: 35 | | | | | | | | |
| SEQ ID | 0.963 | 0.968 | 0.926 | 2.48E−36 | 1.34E−34 | 1.91E−35 | 4 | 3 |
| NO: 47 | | | | | | | | |
| SEQ ID | 0.936 | 0.942 | 0.894 | 6.90E−34 | 3.72E−32 | 4.65E−33 | 6 | 6 |
| NO: 6 | | | | | | | | |
| SEQ ID | 0.922 | 0.92 | 0.935 | 6.99E−32 | 3.77E−30 | 4.19E−31 | 4 | 3 |
| NO: 12 | | | | | | | | |
| SEQ ID | 0.922 | 0.927 | 0.882 | 5.28E−30 | 2.85E−28 | 2.85E−29 | 4 | 4 |
| NO: 46 | | | | | | | | |
| SEQ ID | 0.915 | 0.917 | 0.903 | 2.25E−29 | 1.21E−27 | 1.10E−28 | 5 | 5 |
| NO: 1 | | | | | | | | |
| SEQ ID | 0.919 | 0.916 | 0.935 | 3.12E−29 | 1.68E−27 | 1.40E−28 | 5 | 4 |
| NO: 41 | | | | | | | | |
| SEQ ID | 0.93 | 0.927 | 0.95 | 4.54E−29 | 2.45E−27 | 1.88E−28 | 8 | 7 |
| NO: 22 | | | | | | | | |
| SEQ ID | 0.902 | 0.894 | 0.968 | 1.16E−28 | 6.28E−27 | 4.48E−28 | 3 | 3 |
| NO: 26 | | | | | | | | |
| SEQ ID | 0.901 | 0.897 | 0.929 | 2.78E−28 | 1.50E−26 | 1.00E−27 | 5 | 3 |
| NO: 7 | | | | | | | | |
| SEQ ID | 0.883 | 0.882 | 0.888 | 1.97E−27 | 1.06E−25 | 6.39E−27 | 5 | 4 |
| NO: 15 | | | | | | | | |
| SEQ ID | 0.887 | 0.877 | 0.965 | 2.01E−27 | 1.09E−25 | 6.39E−27 | 5 | 2 |
| NO: 29 | | | | | | | | |
| SEQ ID | 0.89 | 0.892 | 0.871 | 2.51E−25 | 1.35E−23 | 7.52E−25 | 5 | 4 |
| NO: 18 | | | | | | | | |
| SEQ ID | 0.877 | 0.879 | 0.856 | 4.95E−25 | 2.68E−23 | 1.41E−24 | 5 | 2 |
| NO: 34 | | | | | | | | |
| SEQ ID | 0.864 | 0.856 | 0.921 | 4.95E−24 | 2.67E−22 | 1.34E−23 | 5 | 2 |
| NO: 25 | | | | | | | | |
| SEQ ID | 0.857 | 0.856 | 0.862 | 1.17E−23 | 6.31E−22 | 3.01E−23 | 5 | 3 |
| NO: 16 | | | | | | | | |
| SEQ ID | 0.852 | 0.85 | 0.868 | 2.85E−22 | 1.54E−20 | 7.01E−22 | 4 | 2 |
| NO: 2 | | | | | | | | |
| SEQ ID | 0.83 | 0.825 | 0.865 | 5.73E−20 | 3.10E−18 | 1.35E−19 | 4 | 4 |
| NO: 117 | | | | | | | | |
| SEQ ID | 0.829 | 0.826 | 0.85 | 1.05E−18 | 5.66E−17 | 2.36E−18 | 4 | 4 |
| NO: 3 | | | | | | | | |
| SEQ ID | 0.822 | 0.817 | 0.856 | 1.20E−18 | 6.48E−17 | 2.59E−18 | 4 | 4 |
| NO: 48 | | | | | | | | |
| SEQ ID | 0.824 | 0.818 | 0.871 | 2.48E−17 | 1.34E−15 | 5.15E−17 | 4 | 3 |
| NO: 4 | | | | | | | | |
| SEQ ID | 0.801 | 0.805 | 0.771 | 3.41E−16 | 1.84E−14 | 6.69E−16 | 4 | 4 |
| NO: 11 | | | | | | | | |
| SEQ ID | 0.853 | 0.845 | 0.915 | 3.47E−16 | 1.87E−14 | 6.69E−16 | 5 | 4 |
| NO: 5 | | | | | | | | |
| SEQ ID | 0.757 | 0.745 | 0.844 | 1.83E−15 | 9.91E−14 | 3.42E−15 | 5 | 2 |
| NO: 54 | | | | | | | | |
| SEQ ID | 0.742 | 0.728 | 0.844 | 6.80E−15 | 3.67E−13 | 1.22E−14 | 4 | 3 |
| NO: 13 | | | | | | | | |
| SEQ ID | 0.783 | 0.774 | 0.856 | 1.57E−13 | 8.48E−12 | 2.74E−13 | 4 | 1 |
| NO: 43 | | | | | | | | |
| SEQ ID | 0.777 | 0.772 | 0.809 | 1.77E−13 | 9.57E−12 | 2.99E−13 | 5 | 5 |
| NO: 31 | | | | | | | | |
| SEQ ID | 0.783 | 0.766 | 0.906 | 2.28E−12 | 1.23E−10 | 3.73E−12 | 7 | 1 |
| NO: 28 | | | | | | | | |
| SEQ ID | 0.744 | 0.752 | 0.691 | 2.54E−11 | 1.37E−09 | 4.04E−11 | 3 | 1 |
| NO: 32 | | | | | | | | |
| SEQ ID | 0.753 | 0.742 | 0.832 | 4.05E−11 | 2.19E−09 | 6.25E−11 | 4 | 3 |
| NO: 27 | | | | | | | | |
| SEQ ID | 0.702 | 0.698 | 0.738 | 1.12E−09 | 6.07E−08 | 1.68E−09 | 3 | 1 |
| NO: 23 | | | | | | | | |
| SEQ ID | 0.757 | 0.753 | 0.782 | 1.15E−09 | 6.21E−08 | 1.68E−09 | 4 | 1 |
| NO: 42 | | | | | | | | |
| SEQ ID | 0.654 | 0.634 | 0.803 | 1.35E−09 | 7.28E−08 | 1.92E−09 | 4 | 2 |
| NO: 51 | | | | | | | | |
| SEQ ID | 0.714 | 0.713 | 0.721 | 2.47E−08 | 1.33E−06 | 3.41E−08 | 5 | 1 |
| NO: 17 | | | | | | | | |
| SEQ ID | 0.713 | 0.728 | 0.603 | 6.09E−08 | 3.29E−06 | 8.22E−08 | 4 | 2 |
| NO: 52 | | | | | | | | |
| SEQ ID | 0.656 | 0.623 | 0.906 | 7.96E−08 | 4.30E−06 | 1.05E−07 | 4 | 4 |
| NO: 30 | | | | | | | | |
| SEQ ID | 0.643 | 0.608 | 0.903 | 1.26E−07 | 6.79E−06 | 1.62E−07 | 5 | 2 |
| NO: 24 | | | | | | | | |
| SEQ ID | 0.684 | 0.683 | 0.688 | 7.22E−07 | 3.90E−05 | 9.07E−07 | 5 | 1 |
| NO: 40 | | | | | | | | |
| SEQ ID | 0.63 | 0.609 | 0.791 | 9.04E−07 | 4.88E−05 | 1.11E−06 | 5 | 2 |
| NO: 50 | | | | | | | | |
| SEQ ID | 0.667 | 0.664 | 0.685 | 1.55E−06 | 8.36E−05 | 1.86E−06 | 4 | 1 |
| NO: 19 | | | | | | | | |
| SEQ ID | 0.617 | 0.597 | 0.765 | 8.69E−06 | 4.69E−04 | 1.02E−05 | 4 | 1 |
| NO: 21 | | | | | | | | |
| SEQ ID | 0.597 | 0.575 | 0.762 | 1.12E−04 | 6.04E−03 | 1.29E−04 | 3 | 1 |
| NO: 14 | | | | | | | | |
| SEQ ID | 0.603 | 0.579 | 0.785 | 1.35E−03 | 7.29E−02 | 1.52E−03 | 5 | 0 |
| NO: 9 | | | | | | | | |
| SEQ ID | 0.481 | 0.45 | 0.721 | 1.01E−02 | 5.47E−01 | 1.12E−02 | 3 | 0 |
| NO: 33 | | | | | | | | |
| SEQ ID | 0.588 | 0.583 | 0.626 | 1.21E−02 | 6.52E−01 | 1.30E−02 | 4 | 0 |
| NO: 39 | | | | | | | | |
| SEQ ID | 0.472 | 0.445 | 0.674 | 1.94E−02 | 1.00E+00 | 2.06E−02 | 5 | 0 |
| NO: 55 | | | | | | | | |
| SEQ ID | 0.596 | 0.595 | 0.603 | 2.85E−02 | 1.00E+00 | 2.96E−02 | 4 | 0 |
| NO: 36 | | | | | | | | |
| SEQ ID | 0.501 | 0.509 | 0.444 | 3.22E−01 | 1.00E+00 | 3.29E−01 | 4 | 0 |
| NO: 45 | | | | | | | | |
| SEQ ID | 0.343 | 0.309 | 0.606 | 8.51E−01 | 1.00E+00 | 8.51E−01 | 2 | 0 |
| NO: 44 | | | | | | | | |

TABLE 10
DCIS vs. benign breast conditions Chip 1

| | SEQ ID | | | | | P-value | P-value | | n Significant |
|---|---|---|---|---|---|---|---|---|---|
| Gene Name | NO: | Accuracy | Sensitivity | Specificity | p-value | (Bonferroni) | FDR | n Oligos | oligos |
| HS3ST2 | SEQ ID | 0.88 | 0.795 | 0.905 | 1.10E−13 | 6.73E−12 | 6.73E−12 | 2 | 2 |
| | NO: 113 | | | | | | | | |
| SLIT2 | SEQ ID | 0.86 | 0.845 | 0.864 | 2.28E−13 | 1.39E−11 | 6.95E−12 | 4 | 4 |
| | NO: 112 | | | | | | | | |
| RASSF1A | SEQ ID | 0.88 | 0.877 | 0.882 | 3.27E−12 | 2.00E−10 | 6.65E−11 | 3 | 3 |
| | NO: 90 | | | | | | | | |
| GSTP1 | SEQ ID | 0.88 | 0.691 | 0.942 | 3.25E−11 | 1.98E−09 | 4.96E−10 | 4 | 3 |
| | NO: 59 | | | | | | | | |
| GJB2 | SEQ ID | 0.82 | 0.732 | 0.843 | 1.17E−09 | 7.15E−08 | 1.43E−08 | 4 | 1 |
| | NO: 111 | | | | | | | | |
| IGFBP7 | SEQ ID | 0.84 | 0.786 | 0.861 | 1.48E−09 | 9.01E−08 | 1.50E−08 | 5 | 1 |
| | NO: 94 | | | | | | | | |
| CDH13 | SEQ ID | 0.83 | 0.741 | 0.851 | 5.67E−09 | 3.46E−07 | 4.94E−08 | 4 | 4 |
| | NO: 70 | | | | | | | | |
| ARH1/NOEY2 | SEQ ID | 0.84 | 0.777 | 0.857 | 1.57E−08 | 9.57E−07 | 1.20E−07 | 5 | 4 |
| | NO: 97 | | | | | | | | |
| SCGB3A1 | SEQ ID | 0.82 | 0.832 | 0.814 | 6.51E−08 | 3.97E−06 | 4.41E−07 | 4 | 1 |
| | NO: 115 | | | | | | | | |
| FHIT | SEQ ID | 0.79 | 0.814 | 0.781 | 1.23E−07 | 7.50E−06 | 7.50E−07 | 3 | 1 |
| | NO: 76 | | | | | | | | |
| CCND2 | SEQ ID | 0.76 | 0.723 | 0.768 | 1.65E−07 | 1.00E−05 | 9.13E−07 | 6 | 2 |
| | NO: 104 | | | | | | | | |
| HIC1 | SEQ ID | 0.79 | 0.659 | 0.828 | 2.32E−07 | 1.41E−05 | 1.18E−06 | 5 | 1 |
| | NO: 85 | | | | | | | | |
| APC | SEQ ID | 0.73 | 0.6 | 0.773 | 4.29E−07 | 2.62E−05 | 2.01E−06 | 4 | 4 |
| | NO: 65 | | | | | | | | |
| TIMP3 | SEQ ID | 0.77 | 0.605 | 0.82 | 5.93E−07 | 3.62E−05 | 2.58E−06 | 4 | 3 |
| | NO: 103 | | | | | | | | |
| IGSF4 | SEQ ID | 0.75 | 0.732 | 0.753 | 2.17E−06 | 1.32E−04 | 8.83E−06 | 4 | 1 |
| | NO: 74 | | | | | | | | |
| RARB | SEQ ID | 0.77 | 0.614 | 0.818 | 2.53E−06 | 1.54E−04 | 9.65E−06 | 4 | 2 |
| | NO: 88 | | | | | | | | |
| PRDM2 | SEQ ID | 0.8 | 0.8 | 0.793 | 3.88E−06 | 2.36E−04 | 1.39E−05 | 4 | 1 |
| | NO: 114 | | | | | | | | |
| PLAU | SEQ ID | 0.74 | 0.609 | 0.776 | 4.86E−06 | 2.96E−04 | 1.57E−05 | 4 | 2 |
| | NO: 62 | | | | | | | | |
| CDKN2A | SEQ ID | 0.76 | 0.577 | 0.815 | 4.88E−06 | 2.98E−04 | 1.57E−05 | 3 | 0 |
| | NO: 57 | | | | | | | | |
| SLC19A1 | SEQ ID | 0.7 | 0.6 | 0.723 | 1.20E−05 | 7.35E−04 | 3.67E−05 | 3 | 0 |
| | NO: 116 | | | | | | | | |
| ELK1 | SEQ ID | 0.69 | 0.795 | 0.655 | 1.42E−05 | 8.67E−04 | 4.13E−05 | 5 | 0 |
| | NO: 2 | | | | | | | | |
| FABP3 | SEQ ID | 0.8 | 0.655 | 0.846 | 1.80E−05 | 1.10E−03 | 5.00E−05 | 4 | 2 |
| | NO: 77 | | | | | | | | |
| HOXA5 | SEQ ID | 0.75 | 0.618 | 0.785 | 2.40E−05 | 1.46E−03 | 6.36E−05 | 4 | 2 |
| | NO: 78 | | | | | | | | |
| SNCG | SEQ ID | 0.7 | 0.655 | 0.708 | 4.07E−05 | 2.48E−03 | 1.03E−04 | 4 | 1 |
| | NO: 73 | | | | | | | | |
| TGFBR2 | SEQ ID | 0.76 | 0.65 | 0.789 | 4.35E−05 | 2.65E−03 | 1.06E−04 | 4 | 1 |
| | NO: 93 | | | | | | | | |
| PGR | SEQ ID | 0.71 | 0.641 | 0.732 | 5.96E−05 | 3.64E−03 | 1.40E−04 | 4 | 1 |
| | NO: 83 | | | | | | | | |
| THRB | SEQ ID | 0.68 | 0.545 | 0.726 | 1.72E−04 | 1.05E−02 | 3.88E−04 | 4 | 1 |
| | NO: 106 | | | | | | | | |
| EYA4 | SEQ ID | 0.74 | 0.741 | 0.741 | 3.42E−04 | 2.08E−02 | 7.44E−04 | 4 | 0 |
| | NO: 58 | | | | | | | | |
| APAF1 | SEQ ID | 0.72 | 0.659 | 0.736 | 5.53E−04 | 3.37E−02 | 1.16E−03 | 5 | 1 |
| | NO: 82 | | | | | | | | |
| SERPINB5 | SEQ ID | 0.69 | 0.573 | 0.719 | 6.00E−04 | 3.66E−02 | 1.22E−03 | 3 | 0 |
| | NO: 68 | | | | | | | | |
| SASH1 | SEQ ID | 0.69 | 0.527 | 0.742 | 7.38E−04 | 4.50E−02 | 1.45E−03 | 4 | 1 |
| | NO: 102 | | | | | | | | |
| MLH1 | SEQ ID | 0.73 | 0.659 | 0.751 | 8.31E−04 | 5.07E−02 | 1.58E−03 | 4 | 0 |
| | NO: 89 | | | | | | | | |
| CASP8 | SEQ ID | 0.65 | 0.645 | 0.654 | 1.86E−03 | 1.13E−01 | 3.43E−03 | 4 | 0 |
| | NO: 71 | | | | | | | | |
| RARA | SEQ ID | 0.66 | 0.486 | 0.707 | 2.27E−03 | 1.38E−01 | 4.07E−03 | 4 | 0 |
| | NO: 108 | | | | | | | | |
| TERT | SEQ ID | 0.67 | 0.664 | 0.67 | 2.89E−03 | 1.76E−01 | 5.04E−03 | 4 | 0 |
| | NO: 92 | | | | | | | | |
| SOD2 | SEQ ID | 0.69 | 0.591 | 0.72 | 3.25E−03 | 1.98E−01 | 5.50E−03 | 4 | 0 |
| | NO: 105 | | | | | | | | |
| SYK | SEQ ID | 0.64 | 0.527 | 0.669 | 3.85E−03 | 2.35E−01 | 6.20E−03 | 4 | 0 |
| | NO: 60 | | | | | | | | |
| TWIST | SEQ ID | 0.65 | 0.659 | 0.645 | 3.86E−03 | 2.36E−01 | 6.20E−03 | 4 | 0 |
| | NO: 100 | | | | | | | | |
| S100A7 | SEQ ID | 0.72 | 0.486 | 0.784 | 5.17E−03 | 3.15E−01 | 8.09E−03 | 3 | 0 |
| | NO: 96 | | | | | | | | |
| ESR2 | SEQ ID | 0.66 | 0.573 | 0.688 | 7.05E−03 | 4.30E−01 | 1.08E−02 | 4 | 0 |
| | NO: 91 | | | | | | | | |
| ESR1 | SEQ ID | 0.64 | 0.782 | 0.603 | 9.45E−03 | 5.76E−01 | 1.40E−02 | 3 | 0 |
| | NO: 75 | | | | | | | | |
| MCT1 | SEQ ID | 0.65 | 0.641 | 0.655 | 9.62E−03 | 5.87E−01 | 1.40E−02 | 4 | 0 |
| | NO: 101 | | | | | | | | |
| TP73 | SEQ ID | 0.65 | 0.641 | 0.649 | 1.06E−02 | 6.47E−01 | 1.50E−02 | 4 | 0 |
| | NO: 86 | | | | | | | | |
| TMS1/ASC | SEQ ID | 0.57 | 0.568 | 0.564 | 1.54E−02 | 9.40E−01 | 2.14E−02 | 4 | 0 |
| | NO: 84 | | | | | | | | |
| THBS1 | SEQ ID | 0.58 | 0.618 | 0.566 | 1.82E−02 | 1.00E+00 | 2.47E−02 | 4 | 0 |
| | NO: 81 | | | | | | | | |
| PRSS8 | SEQ ID | 0.6 | 0.618 | 0.6 | 2.71E−02 | 1.00E+00 | 3.59E−02 | 4 | 0 |
| | NO: 72 | | | | | | | | |
| ALX4 | SEQ ID | 0.63 | 0.395 | 0.7 | 4.40E−02 | 1.00E+00 | 5.71E−02 | 4 | 0 |
| | NO: 64 | | | | | | | | |
| DAPK1 | SEQ ID | 0.57 | 0.6 | 0.559 | 7.28E−02 | 1.00E+00 | 9.25E−02 | 2 | 0 |
| | NO: 98 | | | | | | | | |
| TPM1 | SEQ ID | 0.59 | 0.473 | 0.63 | 9.68E−02 | 1.00E+00 | 1.21E−01 | 4 | 0 |
| | NO: 110 | | | | | | | | |
| CDKN1A | SEQ ID | 0.59 | 0.645 | 0.577 | 1.09E−01 | 1.00E+00 | 1.33E−01 | 4 | 0 |
| | NO: 67 | | | | | | | | |
| CDH1 | SEQ ID | 0.58 | 0.436 | 0.628 | 1.28E−01 | 1.00E+00 | 1.53E−01 | 5 | 0 |
| | NO: 79 | | | | | | | | |
| IL6 | SEQ ID | 0.6 | 0.45 | 0.639 | 1.44E−01 | 1.00E+00 | 1.69E−01 | 4 | 0 |
| | NO: 99 | | | | | | | | |
| CLDN7 | SEQ ID | 0.55 | 0.609 | 0.526 | 1.88E−01 | 1.00E+00 | 2.16E−01 | 4 | 0 |
| | NO: 87 | | | | | | | | |
| GPC3 | SEQ ID | 0.52 | 0.482 | 0.532 | 2.00E−01 | 1.00E+00 | 2.26E−01 | 4 | 0 |
| | NO: 118 | | | | | | | | |
| STAT1 | SEQ ID | 0.56 | 0.618 | 0.545 | 4.52E−01 | 1.00E+00 | 5.01E−01 | 4 | 0 |
| | NO: 109 | | | | | | | | |
| SFN | SEQ ID | 0.49 | 0.345 | 0.536 | 5.20E−01 | 1.00E+00 | 5.67E−01 | 4 | 0 |
| | NO: 69 | | | | | | | | |
| BRCA2 | SEQ ID | 0.55 | 0.423 | 0.581 | 5.57E−01 | 1.00E+00 | 5.96E−01 | 5 | 0 |
| | NO: 56 | | | | | | | | |
| NME1 | SEQ ID | 0.48 | 0.35 | 0.52 | 7.13E−01 | 1.00E+00 | 7.50E−01 | 4 | 0 |
| | NO: 107 | | | | | | | | |
| TP53 | SEQ ID | 0.51 | 0.409 | 0.545 | 7.47E−01 | 1.00E+00 | 7.72E−01 | 4 | 0 |
| | NO: 80 | | | | | | | | |
| BRCA1 | SEQ ID | 0.47 | 0.318 | 0.515 | 8.59E−01 | 1.00E+00 | 8.73E−01 | 4 | 0 |
| | NO: 66 | | | | | | | | |
| LOT1 | SEQ ID | 0.54 | 0.232 | 0.628 | 8.86E−01 | 1.00E+00 | 8.86E−01 | 4 | 0 |
| | NO: 95 | | | | | | | | |

TABLE 11
DCIS vs. benign breast conditions Chip 2

| SEQ ID | | | | | P-value | P-value | | n Significant |
|---|---|---|---|---|---|---|---|---|
| NO | Accuracy | Sensitivity | Specificity | P-value | (Bonferroni) | FDR | n Oligos | oligos |
| SEQ ID | 0.892 | 0.864 | 0.901 | 2.28E−16 | 1.23E−14 | 1.23E−14 | 4 | 3 |
| NO: 27 | | | | | | | | |
| SEQ ID | 0.86 | 0.818 | 0.874 | 1.63E−13 | 8.80E−12 | 4.40E−12 | 4 | 3 |
| NO: 12 | | | | | | | | |
| SEQ ID | 0.91 | 0.859 | 0.926 | 3.75E−13 | 2.03E−11 | 6.76E−12 | 4 | 3 |
| NO: 46 | | | | | | | | |
| SEQ ID | 0.89 | 0.827 | 0.91 | 9.50E−12 | 5.13E−10 | 1.18E−10 | 4 | 3 |
| NO: 3 | | | | | | | | |
| SEQ ID | 0.876 | 0.791 | 0.903 | 1.09E−11 | 5.88E−10 | 1.18E−10 | 4 | 4 |
| NO: 117 | | | | | | | | |
| SEQ ID | 0.804 | 0.845 | 0.791 | 3.79E−11 | 2.05E−09 | 3.41E−10 | 4 | 2 |
| NO: 48 | | | | | | | | |
| SEQ ID | 0.874 | 0.836 | 0.887 | 7.60E−11 | 4.10E−09 | 5.86E−10 | 5 | 3 |
| NO: 41 | | | | | | | | |
| SEQ ID | 0.792 | 0.664 | 0.834 | 3.02E−10 | 1.63E−08 | 2.04E−09 | 4 | 4 |
| NO: 4 | | | | | | | | |
| SEQ ID | 0.871 | 0.859 | 0.875 | 6.76E−10 | 3.65E−08 | 4.06E−09 | 6 | 5 |
| NO: 6 | | | | | | | | |
| SEQ ID | 0.849 | 0.768 | 0.875 | 7.78E−10 | 4.20E−08 | 4.20E−09 | 5 | 2 |
| NO: 24 | | | | | | | | |
| SEQ ID | 0.823 | 0.718 | 0.857 | 8.60E−10 | 4.65E−08 | 4.22E−09 | 5 | 5 |
| NO: 31 | | | | | | | | |
| SEQ ID | 0.87 | 0.695 | 0.926 | 2.10E−09 | 1.14E−07 | 9.46E−09 | 4 | 1 |
| NO: 51 | | | | | | | | |
| SEQ ID | 0.833 | 0.745 | 0.862 | 2.52E−09 | 1.36E−07 | 1.05E−08 | 5 | 3 |
| NO: 7 | | | | | | | | |
| SEQ ID | 0.813 | 0.768 | 0.828 | 4.22E−09 | 2.28E−07 | 1.63E−08 | 4 | 3 |
| NO: 13 | | | | | | | | |
| SEQ ID | 0.84 | 0.764 | 0.865 | 1.11E−08 | 6.01E−07 | 4.01E−08 | 4 | 3 |
| NO: 30 | | | | | | | | |
| SEQ ID | 0.829 | 0.745 | 0.856 | 4.47E−08 | 2.42E−06 | 1.51E−07 | 4 | 1 |
| NO: 42 | | | | | | | | |
| SEQ ID | 0.847 | 0.691 | 0.897 | 2.98E−07 | 1.61E−05 | 9.48E−07 | 5 | 1 |
| NO: 16 | | | | | | | | |
| SEQ ID | 0.778 | 0.659 | 0.816 | 3.18E−07 | 1.72E−05 | 9.55E−07 | 5 | 1 |
| NO: 34 | | | | | | | | |
| SEQ ID | 0.797 | 0.705 | 0.826 | 1.01E−06 | 5.43E−05 | 2.86E−06 | 8 | 4 |
| NO: 22 | | | | | | | | |
| SEQ ID | 0.758 | 0.718 | 0.771 | 1.65E−06 | 8.91E−05 | 4.45E−06 | 5 | 1 |
| NO: 17 | | | | | | | | |
| SEQ ID | 0.758 | 0.709 | 0.774 | 1.96E−06 | 1.06E−04 | 5.05E−06 | 5 | 2 |
| NO: 54 | | | | | | | | |
| SEQ ID | 0.731 | 0.573 | 0.782 | 3.01E−06 | 1.62E−04 | 7.38E−06 | 5 | 1 |
| NO: 50 | | | | | | | | |
| SEQ ID | 0.804 | 0.532 | 0.893 | 4.52E−06 | 2.44E−04 | 1.06E−05 | 3 | 0 |
| NO: 33 | | | | | | | | |
| SEQ ID | 0.73 | 0.641 | 0.759 | 9.90E−06 | 5.35E−04 | 2.23E−05 | 5 | 0 |
| NO: 38 | | | | | | | | |
| SEQ ID | 0.732 | 0.623 | 0.768 | 1.22E−05 | 6.61E−04 | 2.64E−05 | 9 | 1 |
| NO: 10 | | | | | | | | |
| SEQ ID | 0.834 | 0.545 | 0.928 | 1.69E−05 | 9.11E−04 | 3.50E−05 | 5 | 0 |
| NO: 9 | | | | | | | | |
| SEQ ID | 0.764 | 0.6 | 0.818 | 2.16E−05 | 1.16E−03 | 4.31E−05 | 5 | 2 |
| NO: 18 | | | | | | | | |
| SEQ ID | 0.773 | 0.591 | 0.832 | 4.56E−05 | 2.46E−03 | 8.79E−05 | 3 | 1 |
| NO: 23 | | | | | | | | |
| SEQ ID | 0.692 | 0.677 | 0.697 | 1.49E−04 | 8.06E−03 | 2.76E−04 | 4 | 1 |
| NO: 2 | | | | | | | | |
| SEQ ID | 0.666 | 0.591 | 0.69 | 1.53E−04 | 8.27E−03 | 2.76E−04 | 3 | 1 |
| NO: 32 | | | | | | | | |
| SEQ ID | 0.711 | 0.591 | 0.75 | 1.65E−04 | 8.90E−03 | 2.82E−04 | 5 | 0 |
| NO: 29 | | | | | | | | |
| SEQ ID | 0.713 | 0.7 | 0.718 | 1.67E−04 | 9.03E−03 | 2.82E−04 | 4 | 1 |
| NO: 39 | | | | | | | | |
| SEQ ID | 0.72 | 0.673 | 0.735 | 2.13E−04 | 1.15E−02 | 3.49E−04 | 4 | 1 |
| NO: 43 | | | | | | | | |
| SEQ ID | 0.71 | 0.527 | 0.769 | 2.74E−04 | 1.48E−02 | 4.31E−04 | 4 | 1 |
| NO: 11 | | | | | | | | |
| SEQ ID | 0.728 | 0.586 | 0.774 | 2.80E−04 | 1.51E−02 | 4.31E−04 | 4 | 0 |
| NO: 47 | | | | | | | | |
| SEQ ID | 0.637 | 0.682 | 0.622 | 1.45E−03 | 7.84E−02 | 2.18E−03 | 3 | 0 |
| NO: 26 | | | | | | | | |
| SEQ ID | 0.646 | 0.823 | 0.588 | 2.25E−03 | 1.21E−01 | 3.28E−03 | 4 | 0 |
| NO: 52 | | | | | | | | |
| SEQ ID | 0.647 | 0.627 | 0.653 | 2.58E−03 | 1.40E−01 | 3.67E−03 | 5 | 0 |
| NO: 25 | | | | | | | | |
| SEQ ID | 0.699 | 0.505 | 0.762 | 3.07E−03 | 1.66E−01 | 4.25E−03 | 3 | 0 |
| NO: 14 | | | | | | | | |
| SEQ ID | 0.586 | 0.55 | 0.597 | 7.37E−03 | 3.98E−01 | 9.95E−03 | 4 | 0 |
| NO: 20 | | | | | | | | |
| SEQ ID | 0.658 | 0.518 | 0.703 | 1.16E−02 | 6.27E−01 | 1.53E−02 | 4 | 0 |
| NO: 19 | | | | | | | | |
| SEQ ID | 0.658 | 0.514 | 0.704 | 1.93E−02 | 1.00E+00 | 2.48E−02 | 7 | 0 |
| NO: 28 | | | | | | | | |
| SEQ ID | 0.642 | 0.641 | 0.643 | 3.10E−02 | 1.00E+00 | 3.90E−02 | 5 | 0 |
| NO: 8 | | | | | | | | |
| SEQ ID | 0.681 | 0.536 | 0.728 | 4.06E−02 | 1.00E+00 | 4.99E−02 | 5 | 0 |
| NO: 40 | | | | | | | | |
| SEQ ID | 0.58 | 0.445 | 0.624 | 6.69E−02 | 1.00E+00 | 7.95E−02 | 5 | 0 |
| NO: 1 | | | | | | | | |
| SEQ ID | 0.633 | 0.459 | 0.69 | 6.77E−02 | 1.00E+00 | 7.95E−02 | 4 | 0 |
| NO: 35 | | | | | | | | |
| SEQ ID | 0.606 | 0.518 | 0.634 | 8.76E−02 | 1.00E+00 | 1.01E−01 | 5 | 0 |
| NO: 15 | | | | | | | | |
| SEQ ID | 0.566 | 0.577 | 0.562 | 9.68E−02 | 1.00E+00 | 1.09E−01 | 4 | 0 |
| NO: 36 | | | | | | | | |
| SEQ ID | 0.667 | 0.409 | 0.75 | 1.00E−01 | 1.00E+00 | 1.10E−01 | 5 | 0 |
| NO: 55 | | | | | | | | |
| SEQ ID | 0.607 | 0.427 | 0.665 | 1.57E−01 | 1.00E+00 | 1.69E−01 | 4 | 0 |
| NO: 45 | | | | | | | | |
| SEQ ID | 0.597 | 0.468 | 0.638 | 2.14E−01 | 1.00E+00 | 2.27E−01 | 5 | 0 |
| NO: 5 | | | | | | | | |
| SEQ ID | 0.62 | 0.491 | 0.662 | 2.22E−01 | 1.00E+00 | 2.31E−01 | 4 | 0 |
| NO: 21 | | | | | | | | |
| SEQ ID | 0.636 | 0.391 | 0.715 | 3.37E−01 | 1.00E+00 | 3.44E−01 | 3 | 0 |
| NO: 37 | | | | | | | | |
| SEQ ID | 0.55 | 0.186 | 0.668 | 6.49E−01 | 1.00E+00 | 6.49E−01 | 2 | 0 |
| NO: 44 | | | | | | | | |

TABLE 12
Chip 1 Breast cancer vs. benign breast conditions

| | SEQ ID | | | | | P-value | P-value | n | n Significant |
|---|---|---|---|---|---|---|---|---|---|
| Gene Name | NO: | Accuracy | Sensitivity | Specificity | p-value | (Bonferroni) | FDR | Oligos | oligos |
| SLIT2 | SEQ ID | 0.836 | 0.829 | 0.861 | 3.16E−37 | 1.92E−35 | 0.00 | 4 | 4 |
| | NO: 112 | | | | | | | | |
| HS3ST2 | SEQ ID | 0.852 | 0.854 | 0.843 | 4.37E−33 | 2.66E−31 | 0.00 | 2 | 2 |
| | NO: 113 | | | | | | | | |
| HOXA5 | SEQ ID | 0.782 | 0.784 | 0.776 | 5.67E−28 | 3.46E−26 | 0.00 | 4 | 4 |
| | NO: 78 | | | | | | | | |
| ARH1/NOEY2 | SEQ ID | 0.771 | 0.727 | 0.924 | 2.55E−24 | 1.56E−22 | 0.00 | 5 | 5 |
| | NO: 97 | | | | | | | | |
| IGFBP7 | SEQ ID | 0.769 | 0.759 | 0.801 | 4.30E−24 | 2.62E−22 | 0.00 | 5 | 3 |
| | NO: 94 | | | | | | | | |
| PLAU | SEQ ID | 0.774 | 0.765 | 0.805 | 3.29E−23 | 2.01E−21 | 0.00 | 4 | 3 |
| | NO: 62 | | | | | | | | |
| CDH13 | SEQ ID | 0.741 | 0.702 | 0.881 | 1.54E−20 | 9.42E−19 | 0.00 | 4 | 4 |
| | NO: 70 | | | | | | | | |
| TIMP3 | SEQ ID | 0.715 | 0.694 | 0.789 | 1.37E−19 | 8.34E−18 | 0.00 | 4 | 4 |
| | NO: 103 | | | | | | | | |
| CCND2 | SEQ ID | 0.729 | 0.716 | 0.776 | 7.23E−19 | 4.41E−17 | 0.00 | 6 | 4 |
| | NO: 104 | | | | | | | | |
| GSTP1 | SEQ ID | 0.686 | 0.632 | 0.88 | 3.12E−18 | 1.90E−16 | 0.00 | 4 | 4 |
| | NO: 59 | | | | | | | | |
| APC | SEQ ID | 0.733 | 0.731 | 0.739 | 6.84E−18 | 4.18E−16 | 0.00 | 4 | 4 |
| | NO: 65 | | | | | | | | |
| SCGB3A1 | SEQ ID | 0.748 | 0.745 | 0.761 | 5.71E−16 | 3.48E−14 | 0.00 | 4 | 1 |
| | NO: 115 | | | | | | | | |
| GJB2 | SEQ ID | 0.679 | 0.638 | 0.824 | 9.16E−16 | 5.59E−14 | 0.00 | 4 | 1 |
| | NO: 111 | | | | | | | | |
| CDKN2A | SEQ ID | 0.669 | 0.614 | 0.862 | 1.30E−15 | 7.94E−14 | 0.00 | 3 | 3 |
| | NO: 57 | | | | | | | | |
| PRDM2 | SEQ ID | 0.718 | 0.696 | 0.795 | 2.85E−14 | 1.74E−12 | 0.00 | 4 | 3 |
| | NO: 114 | | | | | | | | |
| FABP3 | SEQ ID | 0.691 | 0.651 | 0.834 | 1.33E−13 | 8.14E−12 | 0.00 | 4 | 4 |
| | NO: 77 | | | | | | | | |
| S100A7 | SEQ ID | 0.693 | 0.643 | 0.874 | 1.18E−12 | 7.22E−11 | 0.00 | 3 | 1 |
| | NO: 96 | | | | | | | | |
| SNCG | SEQ ID | 0.68 | 0.681 | 0.676 | 1.65E−12 | 1.01E−10 | 0.00 | 4 | 4 |
| | NO: 73 | | | | | | | | |
| RASSF1A | SEQ ID | 0.708 | 0.692 | 0.766 | 8.00E−12 | 4.88E−10 | 0.00 | 3 | 3 |
| | NO: 90 | | | | | | | | |
| TMS1/ASC | SEQ ID | 0.71 | 0.735 | 0.619 | 9.47E−12 | 5.77E−10 | 0.00 | 4 | 1 |
| | NO: 84 | | | | | | | | |
| FHIT | SEQ ID | 0.688 | 0.664 | 0.774 | 1.23E−11 | 7.48E−10 | 0.00 | 3 | 1 |
| | NO: 76 | | | | | | | | |
| SERPINB5 | SEQ ID | 0.698 | 0.696 | 0.703 | 1.23E−11 | 7.48E−10 | 0.00 | 3 | 1 |
| | NO: 68 | | | | | | | | |
| SYK | SEQ ID | 0.699 | 0.708 | 0.669 | 1.52E−11 | 9.25E−10 | 0.00 | 4 | 2 |
| | NO: 60 | | | | | | | | |
| TWIST | SEQ ID | 0.689 | 0.683 | 0.711 | 2.88E−11 | 1.76E−09 | 0.00 | 4 | 1 |
| | NO: 100 | | | | | | | | |
| HIC1 | SEQ ID | 0.669 | 0.672 | 0.659 | 3.46E−11 | 2.11E−09 | 0.00 | 5 | 3 |
| | NO: 85 | | | | | | | | |
| SLC19A1 | SEQ ID | 0.646 | 0.635 | 0.685 | 2.48E−10 | 1.52E−08 | 0.00 | 3 | 2 |
| | NO: 116 | | | | | | | | |
| APAF1 | SEQ ID | 0.667 | 0.653 | 0.715 | 2.85E−10 | 1.74E−08 | 0.00 | 5 | 1 |
| | NO: 82 | | | | | | | | |
| RARB | SEQ ID | 0.602 | 0.56 | 0.751 | 8.36E−10 | 5.10E−08 | 0.00 | 4 | 3 |
| | NO: 88 | | | | | | | | |
| TGFBR2 | SEQ ID | 0.622 | 0.574 | 0.791 | 1.18E−09 | 7.19E−08 | 0.00 | 4 | 1 |
| | NO: 93 | | | | | | | | |
| MCT1 | SEQ ID | 0.719 | 0.748 | 0.616 | 1.42E−09 | 8.66E−08 | 0.00 | 4 | 2 |
| | NO: 101 | | | | | | | | |
| SOD2 | SEQ ID | 0.667 | 0.653 | 0.716 | 4.08E−09 | 2.49E−07 | 0.00 | 4 | 1 |
| | NO: 105 | | | | | | | | |
| THRB | SEQ ID | 0.663 | 0.642 | 0.738 | 4.27E−09 | 2.61E−07 | 0.00 | 4 | 1 |
| | NO: 106 | | | | | | | | |
| IGSF4 | SEQ ID | 0.674 | 0.66 | 0.723 | 4.38E−09 | 2.67E−07 | 0.00 | 4 | 1 |
| | NO: 74 | | | | | | | | |
| SASH1 | SEQ ID | 0.657 | 0.656 | 0.661 | 7.22E−09 | 4.41E−07 | 0.00 | 4 | 2 |
| | NO: 102 | | | | | | | | |
| THBS1 | SEQ ID | 0.676 | 0.719 | 0.523 | 1.60E−08 | 9.76E−07 | 0.00 | 4 | 2 |
| | NO: 81 | | | | | | | | |
| ESR1 | SEQ ID | 0.694 | 0.724 | 0.585 | 3.85E−08 | 2.35E−06 | 0.00 | 3 | 2 |
| | NO: 75 | | | | | | | | |
| EYA4 | SEQ ID | 0.647 | 0.631 | 0.704 | 4.36E−08 | 2.66E−06 | 0.00 | 4 | 3 |
| | NO: 58 | | | | | | | | |
| RARA | SEQ ID | 0.623 | 0.594 | 0.73 | 1.07E−07 | 6.51E−06 | 0.00 | 4 | 1 |
| | NO: 108 | | | | | | | | |
| CASP8 | SEQ ID | 0.611 | 0.6 | 0.649 | 1.45E−07 | 8.85E−06 | 0.00 | 4 | 1 |
| | NO: 71 | | | | | | | | |
| ALX4 | SEQ ID | 0.588 | 0.543 | 0.747 | 1.68E−07 | 1.02E−05 | 0.00 | 4 | 1 |
| | NO: 64 | | | | | | | | |
| ESR2 | SEQ ID | 0.55 | 0.5 | 0.731 | 1.27E−06 | 7.72E−05 | 0.00 | 4 | 0 |
| | NO: 91 | | | | | | | | |
| NME1 | SEQ ID | 0.581 | 0.538 | 0.732 | 1.60E−06 | 9.74E−05 | 0.00 | 4 | 2 |
| | NO: 107 | | | | | | | | |
| ELK1 | SEQ ID | 0.681 | 0.693 | 0.638 | 1.78E−06 | 1.08E−04 | 0.00 | 5 | 0 |
| | NO: 2 | | | | | | | | |
| MLH1 | SEQ ID | 0.535 | 0.468 | 0.773 | 1.80E−06 | 1.10E−04 | 0.00 | 4 | 1 |
| | NO: 89 | | | | | | | | |
| PGR | SEQ ID | 0.636 | 0.645 | 0.601 | 2.41E−06 | 1.47E−04 | 0.00 | 4 | 2 |
| | NO: 83 | | | | | | | | |
| TERT | SEQ ID | 0.663 | 0.668 | 0.642 | 2.07E−05 | 1.26E−03 | 0.00 | 4 | 2 |
| | NO: 92 | | | | | | | | |
| TP73 | SEQ ID | 0.625 | 0.624 | 0.63 | 6.76E−05 | 4.12E−03 | 0.00 | 4 | 1 |
| | NO: 86 | | | | | | | | |
| CLDN7 | SEQ ID | 0.622 | 0.638 | 0.566 | 1.52E−04 | 9.25E−03 | 0.00 | 4 | 1 |
| | NO: 87 | | | | | | | | |
| IL6 | SEQ ID | 0.567 | 0.552 | 0.622 | 2.09E−04 | 1.28E−02 | 0.00 | 4 | 0 |
| | NO: 99 | | | | | | | | |
| CDKN1A | SEQ ID | 0.6 | 0.619 | 0.531 | 1.22E−03 | 7.43E−02 | 0.00 | 4 | 1 |
| | NO: 67 | | | | | | | | |
| GPC3 | SEQ ID | 0.563 | 0.565 | 0.557 | 1.41E−03 | 8.59E−02 | 0.00 | 4 | 0 |
| | NO: 118 | | | | | | | | |
| LOT1 | SEQ ID | 0.513 | 0.437 | 0.784 | 2.46E−03 | 1.50E−01 | 0.00 | 4 | 0 |
| | NO: 95 | | | | | | | | |
| STAT1 | SEQ ID | 0.61 | 0.616 | 0.586 | 3.20E−03 | 1.95E−01 | 0.00 | 4 | 0 |
| | NO: 109 | | | | | | | | |
| SFN | SEQ ID | 0.545 | 0.549 | 0.53 | 5.58E−03 | 3.40E−01 | 0.01 | 4 | 0 |
| | NO: 69 | | | | | | | | |
| PRSS8 | SEQ ID | 0.542 | 0.532 | 0.578 | 6.37E−03 | 3.88E−01 | 0.01 | 4 | 0 |
| | NO: 72 | | | | | | | | |
| TPM1 | SEQ ID | 0.524 | 0.479 | 0.684 | 1.73E−02 | 1.00E+00 | 0.02 | 4 | 0 |
| | NO: 110 | | | | | | | | |
| BRCA2 | SEQ ID | 0.558 | 0.553 | 0.576 | 2.76E−02 | 1.00E+00 | 0.03 | 5 | 0 |
| | NO: 56 | | | | | | | | |
| BRCA1 | SEQ ID | 0.531 | 0.487 | 0.684 | 4.70E−02 | 1.00E+00 | 0.05 | 4 | 0 |
| | NO: 66 | | | | | | | | |
| TP53 | SEQ ID | 0.484 | 0.449 | 0.607 | 1.87E−01 | 1.00E+00 | 0.19 | 4 | 0 |
| | NO: 80 | | | | | | | | |
| CDH1 | SEQ ID | 0.534 | 0.534 | 0.531 | 3.69E−01 | 1.00E+00 | 0.38 | 5 | 0 |
| | NO: 79 | | | | | | | | |
| DAPK1 | SEQ ID | 0.46 | 0.466 | 0.439 | 9.43E−01 | 1.00E+00 | 0.94 | 2 | 0 |
| | NO: 98 | | | | | | | | |

TABLE 13
Chip 2 Breast cancer vs. benign breast conditions

| SEQ ID | | | | | P-value | | n | n Significant |
|---|---|---|---|---|---|---|---|---|
| NO | Accuracy | Sensitivity | Specificity | P-value | (Bonferroni) | P-value FDR | Oligos | oligos |
| SEQ ID | 0.86 | 0.839 | 0.94 | 2.44E−39 | 1.32E−37 | 1.32E−37 | 4 | 4 |
| NO: 117 | | | | | | | | |
| SEQ ID | 0.852 | 0.839 | 0.899 | 5.84E−36 | 3.15E−34 | 1.58E−34 | 4 | 3 |
| NO: 12 | | | | | | | | |
| SEQ ID | 0.821 | 0.801 | 0.899 | 6.41E−32 | 3.46E−30 | 1.15E−30 | 4 | 4 |
| NO: 46 | | | | | | | | |
| SEQ ID | 0.858 | 0.85 | 0.89 | 1.94E−31 | 1.05E−29 | 2.61E−30 | 6 | 6 |
| NO: 6 | | | | | | | | |
| SEQ ID | 0.838 | 0.828 | 0.878 | 1.08E−29 | 5.86E−28 | 1.17E−28 | 5 | 4 |
| NO: 7 | | | | | | | | |
| SEQ ID | 0.834 | 0.815 | 0.906 | 2.11E−29 | 1.14E−27 | 1.66E−28 | 4 | 4 |
| NO: 3 | | | | | | | | |
| SEQ ID | 0.824 | 0.821 | 0.837 | 2.16E−29 | 1.17E−27 | 1.66E−28 | 5 | 4 |
| NO: 41 | | | | | | | | |
| SEQ ID | 0.802 | 0.787 | 0.857 | 7.96E−29 | 4.30E−27 | 5.37E−28 | 4 | 3 |
| NO: 27 | | | | | | | | |
| SEQ ID | 0.825 | 0.816 | 0.862 | 1.14E−27 | 6.17E−26 | 6.85E−27 | 5 | 5 |
| NO: 31 | | | | | | | | |
| SEQ ID | 0.767 | 0.752 | 0.822 | 4.61E−22 | 2.49E−20 | 2.49E−21 | 4 | 4 |
| NO: 4 | | | | | | | | |
| SEQ ID | 0.73 | 0.686 | 0.897 | 1.82E−21 | 9.83E−20 | 8.94E−21 | 4 | 2 |
| NO: 51 | | | | | | | | |
| SEQ ID | 0.773 | 0.762 | 0.816 | 4.66E−21 | 2.52E−19 | 2.10E−20 | 5 | 3 |
| NO: 18 | | | | | | | | |
| SEQ ID | 0.761 | 0.745 | 0.824 | 9.81E−20 | 5.30E−18 | 4.07E−19 | 4 | 2 |
| NO: 47 | | | | | | | | |
| SEQ ID | 0.745 | 0.722 | 0.829 | 4.98E−18 | 2.69E−16 | 1.92E−17 | 5 | 1 |
| NO: 16 | | | | | | | | |
| SEQ ID | 0.701 | 0.664 | 0.838 | 5.22E−17 | 2.82E−15 | 1.88E−16 | 5 | 2 |
| NO: 34 | | | | | | | | |
| SEQ ID | 0.747 | 0.728 | 0.819 | 9.31E−17 | 5.03E−15 | 3.14E−16 | 4 | 2 |
| NO: 42 | | | | | | | | |
| SEQ ID | 0.695 | 0.655 | 0.844 | 1.61E−15 | 8.69E−14 | 5.11E−15 | 4 | 3 |
| NO: 13 | | | | | | | | |
| SEQ ID | 0.73 | 0.729 | 0.731 | 2.04E−15 | 1.10E−13 | 6.11E−15 | 4 | 4 |
| NO: 39 | | | | | | | | |
| SEQ ID | 0.731 | 0.72 | 0.769 | 3.58E−15 | 1.93E−13 | 1.02E−14 | 4 | 1 |
| NO: 43 | | | | | | | | |
| SEQ ID | 0.691 | 0.66 | 0.807 | 4.12E−15 | 2.23E−13 | 1.11E−14 | 5 | 4 |
| NO: 29 | | | | | | | | |
| SEQ ID | 0.723 | 0.7 | 0.812 | 8.23E−15 | 4.45E−13 | 2.12E−14 | 8 | 7 |
| NO: 22 | | | | | | | | |
| SEQ ID | 0.69 | 0.625 | 0.935 | 1.09E−14 | 5.89E−13 | 2.68E−14 | 4 | 4 |
| NO: 30 | | | | | | | | |
| SEQ ID | 0.688 | 0.67 | 0.756 | 1.90E−14 | 1.03E−12 | 4.46E−14 | 4 | 4 |
| NO: 11 | | | | | | | | |
| SEQ ID | 0.69 | 0.674 | 0.749 | 8.19E−14 | 4.81E−12 | 2.00E−13 | 9 | 4 |
| NO: 10 | | | | | | | | |
| SEQ ID | 0.709 | 0.702 | 0.735 | 1.01E−13 | 5.47E−12 | 2.19E−13 | 5 | 5 |
| NO: 8 | | | | | | | | |
| SEQ ID | 0.727 | 0.718 | 0.762 | 7.74E−13 | 4.18E−11 | 1.61E−12 | 4 | 4 |
| NO: 48 | | | | | | | | |
| SEQ ID | 0.631 | 0.602 | 0.738 | 7.90E−12 | 4.27E−10 | 1.58E−11 | 5 | 2 |
| NO: 50 | | | | | | | | |
| SEQ ID | 0.631 | 0.586 | 0.803 | 2.75E−11 | 1.49E−09 | 5.31E−11 | 3 | 2 |
| NO: 33 | | | | | | | | |
| SEQ ID | 0.606 | 0.56 | 0.778 | 1.94E−10 | 1.05E−08 | 3.62E−10 | 5 | 3 |
| NO: 24 | | | | | | | | |
| SEQ ID | 0.678 | 0.687 | 0.646 | 3.57E−10 | 1.93E−08 | 6.42E−10 | 3 | 2 |
| NO: 26 | | | | | | | | |
| SEQ ID | 0.642 | 0.623 | 0.713 | 2.19E−09 | 1.18E−07 | 3.81E−09 | 5 | 2 |
| NO: 54 | | | | | | | | |
| SEQ ID | 0.665 | 0.653 | 0.712 | 2.52E−09 | 1.36E−07 | 4.25E−09 | 5 | 1 |
| NO: 38 | | | | | | | | |
| SEQ ID | 0.661 | 0.643 | 0.728 | 7.27E−09 | 3.93E−07 | 1.19E−08 | 5 | 1 |
| NO: 25 | | | | | | | | |
| SEQ ID | 0.636 | 0.618 | 0.706 | 1.59E−08 | 8.58E−07 | 2.52E−08 | 3 | 1 |
| NO: 32 | | | | | | | | |
| SEQ ID | 0.664 | 0.635 | 0.774 | 4.69E−08 | 2.53E−06 | 7.24E−08 | 5 | 0 |
| NO: 5 | | | | | | | | |
| SEQ ID | 0.648 | 0.622 | 0.744 | 5.74E−08 | 3.10E−06 | 8.62E−08 | 3 | 1 |
| NO: 23 | | | | | | | | |
| SEQ ID | 0.636 | 0.599 | 0.774 | 1.17E−07 | 6.32E−06 | 1.71E−07 | 5 | 2 |
| NO: 17 | | | | | | | | |
| SEQ ID | 0.64 | 0.638 | 0.647 | 1.33E−07 | 7.17E−06 | 1.89E−07 | 5 | 1 |
| NO: 1 | | | | | | | | |
| SEQ ID | 0.601 | 0.571 | 0.715 | 1.58E−07 | 8.55E−06 | 2.19E−07 | 3 | 1 |
| NO: 14 | | | | | | | | |
| SEQ ID | 0.69 | 0.705 | 0.635 | 3.78E−07 | 2.04E−05 | 5.11E−07 | 4 | 2 |
| NO: 52 | | | | | | | | |
| SEQ ID | 0.642 | 0.619 | 0.728 | 5.19E−07 | 2.80E−05 | 6.83E−07 | 5 | 1 |
| NO: 9 | | | | | | | | |
| SEQ ID | 0.602 | 0.567 | 0.734 | 1.23E−06 | 6.64E−05 | 1.58E−06 | 4 | 1 |
| NO: 19 | | | | | | | | |
| SEQ ID | 0.611 | 0.582 | 0.722 | 3.21E−06 | 1.73E−04 | 4.03E−06 | 5 | 1 |
| NO: 40 | | | | | | | | |
| SEQ ID | 0.623 | 0.641 | 0.553 | 7.05E−05 | 3.81E−03 | 8.65E−05 | 4 | 0 |
| NO: 35 | | | | | | | | |
| SEQ ID | 0.594 | 0.569 | 0.69 | 1.02E−04 | 5.50E−03 | 1.22E−04 | 4 | 1 |
| NO: 2 | | | | | | | | |
| SEQ ID | 0.596 | 0.567 | 0.704 | 1.21E−04 | 6.52E−03 | 1.42E−04 | 7 | 2 |
| NO: 28 | | | | | | | | |
| SEQ ID | 0.583 | 0.584 | 0.579 | 4.02E−04 | 2.17E−02 | 4.61E−04 | 4 | 1 |
| NO: 36 | | | | | | | | |
| SEQ ID | 0.564 | 0.538 | 0.662 | 7.11E−04 | 3.84E−02 | 8.00E−04 | 4 | 1 |
| NO: 20 | | | | | | | | |
| SEQ ID | 0.619 | 0.636 | 0.554 | 5.71E−03 | 3.08E−01 | 6.29E−03 | 3 | 0 |
| NO: 37 | | | | | | | | |
| SEQ ID | 0.425 | 0.33 | 0.781 | 9.30E−02 | 1.00E+00 | 1.00E−01 | 5 | 0 |
| NO: 55 | | | | | | | | |
| SEQ ID | 0.533 | 0.511 | 0.613 | 1.09E−01 | 1.00E+00 | 1.16E−01 | 5 | 0 |
| NO: 15 | | | | | | | | |
| SEQ ID | 0.488 | 0.454 | 0.615 | 1.43E−01 | 1.00E+00 | 1.48E−01 | 2 | 0 |
| NO: 44 | | | | | | | | |
| SEQ ID | 0.528 | 0.521 | 0.556 | 1.53E−01 | 1.00E+00 | 1.55E−01 | 4 | 0 |
| NO: 21 | | | | | | | | |
| SEQ ID | 0.525 | 0.521 | 0.54 | 1.95E−01 | 1.00E+00 | 1.95E−01 | 4 | 0 |
| NO: 45 | | | | | | | | |

TABLE 14
Sample overview

| Sample | | | | | Menopausal |
|---|---|---|---|---|---|
| No. | main class | subclass | sex | age | status |
| 1 | benign breast | Normal Breast | f | 45 | |
| 2 | benign breast | Normal Breast | f | 45 | |
| 3 | benign breast | Normal Breast | f | 17 | |
| 4 | benign breast | Normal Breast | f | 20 | |
| 5 | benign breast | Normal Breast | f | 19 | |
| 6 | benign breast | Normal Breast | f | 33 | |
| 7 | benign breast | Normal Breast | f | 36 | |
| 8 | benign breast | Normal Breast | f | 37 | |
| 9 | benign breast | Normal Breast | f | 57 | |
| 10 | benign breast | Normal Breast | f | 50 | |
| 11 | benign breast | Normal Breast | f | 53 | |
| 12 | benign breast | Normal Breast | f | 77 | |
| 13 | other cancer | ovarian cancer | f | 83 | |
| 14 | other cancer | ovarian cancer | f | 30 | |
| 15 | other cancer | ovarian cancer | f | 53 | |
| 16 | other cancer | ovarian cancer | f | 56 | |
| 17 | other cancer | ovarian cancer | f | 47 | |
| 18 | other cancer | ovarian cancer | f | 63 | |
| 19 | other cancer | ovarian cancer | f | 55 | |
| 20 | other cancer | ovarian cancer | f | 58 | |
| 21 | other cancer | ovarian cancer | f | 49 | |
| 22 | other cancer | ovarian cancer | f | 52 | |
| 23 | other cancer | endometrial cancer | f | 53 | |
| 24 | other cancer | endometrial cancer | f | 46 | |
| 25 | other cancer | endometrial cancer | f | 64 | |
| 26 | other cancer | endometrial cancer | f | 51 | |
| 27 | other cancer | endometrial cancer | f | 80 | |
| 28 | other cancer | endometrial cancer | f | 68 | |
| 29 | other cancer | endometrial cancer | f | 70 | |
| 30 | other cancer | endometrial cancer | f | 77 | |
| 31 | other cancer | endometrial cancer | f | 92 | |
| 32 | other cancer | endometrial cancer | f | 27 | |
| 33 | other cancer | endometrial cancer | f | 52 | |
| 34 | other cancer | endometrial cancer | f | 61 | |
| 35 | other cancer | ovarian cancer | f | 52 | |
| 36 | other cancer | ovarian cancer | f | 65 | |
| 37 | other cancer | ovarian cancer | f | na | |
| 38 | other cancer | ovarian cancer | f | 54 | |
| 39 | other cancer | ovarian cancer | f | 52 | |
| 40 | other cancer | ovarian cancer | f | 68 | |
| 41 | other cancer | endometrial cancer | f | 74 | |
| 42 | other cancer | endometrial cancer | f | 30 | |
| 43 | other cancer | endometrial cancer | f | 44 | |
| 44 | other cancer | endometrial cancer | f | 58 | |
| 45 | benign breast | Normal Breast | f | 78 | |
| 46 | benign breast | Normal Breast | f | 37 | |
| 47 | benign breast | Normal Breast | f | 48 | |
| 48 | benign breast | Normal Breast | f | 37 | |
| 49 | benign breast | Normal Breast | f | 36 | |
| 50 | benign breast | Normal Breast | f | 43 | |
| 51 | benign breast | Normal Breast | f | 41 | |
| 52 | benign breast | Normal Breast | f | 48 | |
| 53 | benign breast | Normal Breast | f | 35 | |
| 54 | benign breast | Normal Breast | f | 41 | pre |
| 55 | benign breast | Normal Breast | f | 48 | |
| 56 | benign breast | Normal Breast | f | 39 | |
| 57 | benign breast | Normal Breast | f | 69 | |
| 58 | benign breast | Normal Breast | f | 52 | |
| 59 | benign breast | Normal Breast | f | 41 | |
| 60 | benign breast | Normal Breast | f | 43 | |
| 61 | benign breast | Normal Breast | f | 36 | |
| 62 | benign breast | Normal Breast | f | 36 | |
| 63 | other cancer | lung cancer | f | — | |
| 64 | other cancer | lung cancer | f | — | |
| 65 | other cancer | lung cancer | f | — | |
| 66 | other cancer | lung cancer | f | — | |
| 67 | other cancer | lung cancer | f | 78 | |
| 68 | other cancer | lung cancer | f | 60 | |
| 69 | other cancer | lung cancer | f | 54 | |
| 70 | other cancer | lung cancer | f | — | |
| 71 | other cancer | lung cancer | f | 67 | post |
| 72 | other cancer | lung cancer | f | 56 | post |
| 73 | other cancer | lung cancer | f | 51 | pre |
| 74 | other cancer | lung cancer | f | 76 | post |
| 75 | other cancer | lung cancer | f | 41 | |
| 76 | other cancer | lung cancer | f | 66 | post |
| 77 | lymphocytes | lymphocytes | f | 60 | |
| 78 | lymphocytes | lymphocytes | f | 57 | |
| 79 | lymphocytes | lymphocytes | f | 61 | |
| 80 | lymphocytes | lymphocytes | f | 61 | |
| 81 | lymphocytes | lymphocytes | f | 49 | |
| 82 | lymphocytes | lymphocytes | f | 48 | |
| 83 | lymphocytes | lymphocytes | f | 42 | |
| 84 | lymphocytes | lymphocytes | f | 44 | |
| 85 | lymphocytes | lymphocytes | f | 47 | |
| 86 | lymphocytes | lymphocytes | f | 47 | |
| 87 | lymphocytes | lymphocytes | f | 49 | |
| 88 | lymphocytes | lymphocytes | f | 55 | |
| 89 | lymphocytes | lymphocytes | f | 55 | |
| 90 | lymphocytes | lymphocytes | f | 55 | |
| 91 | lymphocytes | lymphocytes | m | 49 | |
| 92 | lymphocytes | lymphocytes | f | 65 | |
| 93 | lymphocytes | lymphocytes | f | 82 | |
| 94 | lymphocytes | lymphocytes | f | 64 | |
| 95 | lymphocytes | lymphocytes | f | 74 | |
| 96 | lymphocytes | lymphocytes | f | 37 | |
| 97 | lymphocytes | lymphocytes | f | 37 | |
| 98 | lymphocytes | lymphocytes | f | 42 | |
| 99 | lymphocytes | lymphocytes | f | 28 | |
| 100 | lymphocytes | lymphocytes | f | 58 | |
| 101 | lymphocytes | lymphocytes | f | 67 | |
| 102 | lymphocytes | lymphocytes | f | 38 | |
| 103 | other cancer | lung cancer | f | 55 | |
| 104 | other cancer | lung cancer | f | 56 | |
| 105 | other cancer | lung cancer | f | 68 | |
| 106 | other cancer | lung cancer | f | 80 | |
| 107 | lymphocytes | lymphocytes | m | NA | |
| 108 | lymphocytes | lymphocytes | m | NA | |
| 109 | lymphocytes | lymphocytes | m | NA | |
| 110 | lymphocytes | lymphocytes | m | NA | |
| 111 | lymphocytes | lymphocytes | m | NA | |
| 112 | lymphocytes | lymphocytes | m | NA | |
| 113 | lymphocytes | lymphocytes | m | NA | |
| 114 | lymphocytes | lymphocytes | m | NA | |
| 115 | brca | IDC | f | 69 | post |
| 116 | brca | IDC | f | 69 | post |
| 117 | brca | IDC | f | 33 | pre |
| 118 | brca | IDC | f | 54 | pre |
| 119 | brca | IDC | f | 86 | post |
| 120 | brca | IDC | f | 62 | post |
| 121 | brca | IDC | f | 30 | pre |
| 122 | brca | IDC | f | 33 | pre |
| 123 | brca | IDC | f | 78 | post |
| 124 | brca | IDC | f | 34 | pre |
| 125 | brca | IDC | f | 46 | pre |
| 126 | brca | IDC | f | 61 | post |
| 127 | brca | IDC | f | 44 | pre |
| 128 | brca | IDC | f | 68 | post |
| 129 | brca | IDC | f | 57 | post |
| 130 | brca | IDC | f | 70 | post |
| 131 | brca | IDC | f | 42 | pre |
| 132 | brca | IDC | f | 37 | pre |
| 133 | brca | IDC | f | 45 | pre |
| 134 | brca | IDC | f | 47 | pre |
| 135 | brca | IDC | f | 35 | pre |
| 136 | brca | IDC | f | 49 | pre |
| 137 | brca | IDC | f | 40 | post |
| 138 | brca | IDC | f | 75 | post |
| 139 | brca | IDC | f | 76 | post |
| 140 | brca | IDC | f | 69 | post |
| 141 | brca | IDC | f | 46 | pre |
| 142 | brca | IDC | f | 50 | pre |
| 143 | brca | IDC | f | 44 | pre |
| 144 | brca | IDC | f | 47 | pre |
| 145 | brca | ILC | f | 47 | pre |
| 146 | brca | IDC | f | 56 | post |
| 147 | brca | IDC | f | 40 | pre |
| 148 | brca | IDC | f | 38 | pre |
| 149 | brca | ILC | f | 50 | pre |
| 150 | brca | IDC | f | 42 | pre |
| 151 | brca | ILC | f | 55 | pre |
| 152 | brca | IDC | f | 62 | post |
| 153 | brca | IDC | f | 63 | post |
| 154 | brca | IDC | f | 38 | pre |
| 155 | brca | IDC | f | 32 | pre |
| 156 | brca | IDC | f | 59 | post |
| 157 | brca | IDC | f | 53 | post |
| 158 | brca | IDC | f | 38 | pre |
| 159 | brca | IDC | f | 43 | pre |
| 160 | brca | IDC | f | 46 | pre |
| 161 | brca | IDC | f | 47 | pre |
| 162 | brca | IDC | f | 52 | pre |
| 163 | brca | IDC | f | 55 | post |
| 164 | brca | IDC | f | 68 | post |
| 165 | brca | IDC | f | 68 | post |
| 166 | brca | IDC | f | 63 | post |
| 167 | brca | IDC | f | 49 | post |
| 168 | brca | IDC | f | 47 | pre |
| 169 | brca | IDC | f | 50 | pre |
| 170 | brca | IDC | f | 66 | post |
| 171 | brca | ILC | f | 48 | pre |
| 172 | brca | IDC | f | 56 | post |
| 173 | brca | IDC | f | 53 | post |
| 174 | brca | IDC | f | 33 | pre |
| 175 | brca | IDC | f | 48 | pre |
| 176 | brca | ILC | f | 40 | pre |
| 177 | brca | ILC | f | 44 | pre |
| 178 | brca | IDC | f | 79 | post |
| 179 | brca | IDC | f | 78 | post |
| 180 | brca | IDC | f | 30 | pre |
| 181 | brca | IDC | f | 44 | pre |
| 182 | brca | IDC | f | 45 | pre |
| 183 | brca | ILC | f | 47 | pre |
| 184 | brca | ILC | f | 51 | pre |
| 185 | brca | IDC | f | 65 | post |
| 186 | brca | IDC | f | 70 | post |
| 187 | brca | IDC | f | 51 | pre |
| 188 | brca | IDC | f | 67 | post |
| 189 | brca | IDC | f | 44 | pre |
| 190 | brca | IDC | f | 64 | post |
| 191 | brca | IDC | f | 72 | post |
| 192 | brca | ILC | f | 42 | pre |
| 193 | brca | IDC | f | 41 | pre |
| 194 | brca | ILC | f | 37 | pre |
| 195 | brca | IDC | f | 65 | post |
| 196 | brca | IDC | f | 67 | post |
| 197 | brca | IDC | f | 62 | post |
| 198 | brca | IDC | f | 51 | pre |
| 199 | brca | IDC | f | 55 | post |
| 200 | brca | IDC | f | 53 | post |
| 201 | brca | IDC | f | 74 | post |
| 202 | brca | ILC | f | 45 | pre |
| 203 | brca | ILC | f | 46 | pre |
| 204 | brca | IDC | f | 85 | post |
| 205 | brca | IDC | f | 72 | post |
| 206 | brca | IDC | f | 48 | pre |
| 207 | brca | IDC | f | 62 | post |
| 208 | brca | IDC | f | 52 | post |
| 209 | brca | IDC | f | 45 | pre |
| 210 | brca | IDC | f | 35 | pre |
| 211 | brca | IDC | f | 71 | post |
| 212 | brca | IDC | f | 61 | post |
| 213 | brca | IDC | f | 49 | pre |
| 214 | brca | IDC | f | 24 | pre |
| 215 | brca | IDC | f | 48 | pre |
| 216 | brca | IDC | f | 51 | post |
| 217 | brca | IDC | f | 61 | post |
| 218 | brca | IDC | f | 55 | post |
| 219 | brca | IDC | f | 87 | post |
| 220 | brca | IDC | f | 51 | post |
| 221 | brca | IDC | f | 43 | pre |
| 222 | brca | IDC | f | 65 | post |
| 223 | brca | IDC | f | 59 | post |
| 224 | brca | IDC | f | 53 | post |
| 225 | brca | IDC | f | 51 | pre |
| 226 | brca | IDC | f | 31 | pre |
| 227 | brca | IDC | f | 54 | post |
| 228 | brca | IDC | f | 60 | post |
| 229 | brca | ILC | f | 49 | pre |
| 230 | brca | IDC | f | 46 | pre |
| 231 | brca | IDC | f | 74 | post |
| 232 | brca | IDC | f | 47 | pre |
| 233 | brca | IDC | f | 46 | pre |
| 234 | brca | IDC | f | 44 | pre |
| 235 | brca | ILC | f | 48 | pre |
| 236 | brca | IDC | f | 51 | post |
| 237 | brca | ILC | f | 35 | pre |
| 238 | brca | IDC | f | 32 | pre |
| 239 | brca | IDC | f | 40 | pre |
| 240 | brca | IDC | f | 43 | pre |
| 241 | brca | IDC | f | 60 | post |
| 242 | brca | IDC | f | 76 | post |
| 243 | brca | IDC | f | 48 | pre |
| 244 | brca | IDC | f | 48 | pre |
| 245 | brca | IDC | f | 33 | pre |
| 246 | brca | IDC | f | 58 | post |
| 247 | brca | IDC | f | 62 | post |
| 248 | brca | IDC | f | 46 | post |
| 249 | brca | IDC | f | 63 | post |
| 250 | brca | IDC | f | 64 | post |
| 251 | brca | IDC | f | 46 | pre |
| 252 | brca | IDC | f | 47 | pre |
| 253 | brca | ILC | f | 44 | pre |
| 254 | brca | IDC | f | 38 | pre |
| 255 | brca | ILC | f | 38 | pre |
| 256 | brca | IDC | f | 48 | pre |
| 257 | brca | IDC | f | 50 | pre |
| 258 | brca | IDC | f | 66 | post |
| 259 | brca | IDC | f | 33 | pre |
| 260 | brca | IDC | f | 59 | post |
| 261 | brca | IDC | f | 35 | pre |
| 262 | brca | IDC | f | 59 | post |
| 263 | brca | IDC | f | 65 | post |
| 264 | brca | IDC | f | 56 | post |
| 265 | brca | IDC | f | 52 | post |
| 266 | brca | IDC | f | 47 | pre |
| 267 | brca | IDC | f | 75 | post |
| 268 | brca | IDC | f | 29 | pre |
| 269 | brca | IDC | f | 70 | post |
| 270 | brca | IDC | f | 79 | post |
| 271 | brca | IDC | f | 63 | post |
| 272 | brca | ILC | f | 37 | pre |
| 273 | brca | IDC | f | 69 | post |
| 274 | brca | IDC | f | 57 | post |
| 275 | brca | IDC | f | 72 | post |
| 276 | brca | IDC | f | 79 | post |
| 277 | brca | IDC | f | 53 | post |
| 278 | brca | IDC | f | 52 | pre |
| 279 | brca | IDC | f | 48 | pre |
| 280 | brca | ILC | f | 44 | pre |
| 281 | brca | IDC | f | 50 | pre |
| 282 | brca | IDC | f | 61 | post |
| 283 | brca | IDC | f | 57 | post |
| 284 | brca | IDC | f | 64 | post |
| 285 | brca | IDC | f | 43 | pre |
| 286 | brca | ILC | f | 46 | pre |
| 287 | brca | IDC | f | 62 | post |
| 288 | brca | IDC | f | 32 | pre |
| 289 | brca | IDC | f | 40 | pre |
| 290 | brca | IDC | f | 65 | post |
| 291 | brca | IDC | f | 47 | pre |
| 292 | brca | IDC | f | 45 | pre |
| 293 | brca | IDC | f | 51 | pre |
| 294 | brca | IDC | f | 62 | post |
| 295 | brca | IDC | f | 72 | post |
| 296 | brca | IDC | f | 52 | post |
| 297 | brca | IDC | f | 52 | post |
| 298 | brca | IDC | f | 46 | pre |
| 299 | brca | IDC | f | 61 | post |
| 300 | brca | IDC | f | 51 | pre |
| 301 | brca | IDC | f | 48 | pre |
| 302 | brca | IDC | f | 47 | pre |
| 303 | brca | IDC | f | 44 | pre |
| 304 | brca | IDC | f | 52 | pre |
| 305 | brca | IDC | f | 55 | post |
| 306 | brca | IDC | f | 42 | pre |
| 307 | brca | IDC | f | 49 | pre |
| 308 | brca | IDC | f | 52 | post |
| 309 | brca | IDC | f | 69 | post |
| 310 | brca | IDC | f | 64 | post |
| 311 | brca | IDC | f | 40 | pre |
| 312 | brca | IDC | f | 45 | pre |
| 313 | brca | IDC | f | 66 | post |
| 314 | brca | IDC | f | 64 | post |
| 315 | brca | IDC | f | 53 | post |
| 316 | brca | ILC | f | 51 | pre |
| 317 | brca | IDC | f | 54 | post |
| 318 | brca | IDC | f | 52 | pre |
| 319 | brca | IDC | f | 45 | pre |
| 320 | brca | ILC | f | 54 | pre |
| 321 | brca | IDC | f | 52 | pre |
| 322 | brca | IDC | f | 47 | pre |
| 323 | brca | ILC | f | 41 | pre |
| 324 | brca | IDC | f | 56 | post |
| 325 | brca | IDC | f | 72 | post |
| 326 | brca | ILC | f | 41 | pre |
| 327 | brca | IDC | f | 54 | pre |
| 328 | brca | IDC | f | 36 | pre |
| 329 | brca | IDC | f | 44 | pre |
| 330 | brca | IDC | f | 71 | post |
| 331 | brca | IDC | f | 38 | pre |
| 332 | brca | IDC | f | 27 | pre |
| 333 | brca | IDC | f | 42 | pre |
| 334 | brca | IDC | f | 51 | pre |
| 335 | brca | DCIS | f | 49 | |
| 336 | brca | DCIS | f | 96 | |
| 337 | brca | DCIS | f | 39 | |
| 338 | benign breast | fibroadenoma | f | 36 | |
| 339 | benign breast | fibroadenoma | f | 42 | |
| 340 | benign breast | fibroadenoma | f | 24 | |
| 341 | benign breast | fibroadenoma | f | 27 | |
| 342 | benign breast | fibroadenoma | f | 42 | |
| 343 | benign breast | fibroadenoma | f | 50 | |
| 344 | benign breast | fibroadenoma | f | 43 | |
| 345 | benign breast | fibroadenoma | f | 43 | |
| 346 | benign breast | fibroadenoma | f | 33 | |
| 347 | benign breast | fibrocystic changes | f | 54 | |
| 348 | benign breast | fibrocystic changes | f | 61 | |
| 349 | benign breast | fibrocystic disease | f | 35 | |
| 350 | benign breast | fibrocystic changes | f | 44 | |
| 351 | benign breast | fibrocystic disease | f | 45 | |
| 352 | benign breast | Breast Benign Disease | f | 45 | |
| 353 | brca | BRCA1 | f | 44 | |
| 354 | brca | BRCA1 | f | 31 | |
| 355 | brca | BRCA1 | f | 39 | |
| 356 | brca | BRCA1 | f | 32 | |
| 357 | brca | BRCA1 | f | 44 | |
| 358 | brca | BRCA1 | f | 35 | |
| 359 | brca | BRCA1 | f | 32 | |
| 360 | brca | BRCA1 | f | 32 | |
| 361 | brca | BRCA1 | f | 29 | |
| 362 | brca | BRCA1 | f | 47 | |
| 363 | brca | BRCA1 | f | 49 | |
| 364 | brca | BRCA1 | f | 37 | |
| 365 | brca | BRCA1 | f | 32 | |
| 366 | brca | BRCA1 | f | 50 | |
| 367 | brca | BRCA1 | f | 35 | |
| 368 | brca | BRCA1 | f | 56 | |
| 369 | brca | BRCA1 | f | 49 | |
| 370 | brca | BRCA1 | f | 44 | |
| 371 | brca | BRCA1 | f | 45 | |
| 372 | brca | BRCA1 | f | 37 | |
| 373 | brca | BRCA1 | f | 37 | |
| 374 | brca | BRCA1 | f | 29 | |
| 375 | brca | BRCA1 | f | 41 | |
| 376 | brca | DCIS | f | 59 | |
| 377 | brca | IDC | f | 61 | |
| 378 | brca | DCIS | f | 46 | |
| 379 | brca | DCIS | f | 38 | |
| 380 | brca | DCIS | f | 45 | |
| 381 | brca | DCIS | f | 46 | |
| 382 | benign breast | Normal Breast | f | 44 | |
| 383 | brca | DCIS | f | 58 | |
| 384 | brca | DCIS | f | 52 | |
| 385 | brca | DCIS | f | 60 | |
| 386 | brca | DCIS | f | 46 | |
| 387 | brca | DCIS | f | 60 | |
| 388 | brca | DCIS | f | 59 | |
| 389 | brca | DCIS | f | 60 | |
| 390 | brca | DCIS | f | 62 | |
| 391 | brca | DCIS | f | 39 | |
| 392 | brca | DCIS | f | 50 | |
| 393 | brca | DCIS | f | 62 | |
| 394 | brca | IDC | f | 84 | |
| 395 | benign breast | Normal Breast | f | 55 | |
| 396 | brca | DCIS | f | 41 | |
| 397 | brca | IDC | f | 32 | |
| 398 | brca | IDC | f | 49 | |
| 399 | brca | DCIS | f | 43 | |
| 400 | brca | DCIS | f | 48 | |
| 401 | brca | DCIS | f | 45 | |
| 402 | brca | IDC | f | 33 | |
| 403 | benign breast | Normal Breast | f | 71 | |
| 404 | benign breast | Normal Breast | f | 40 | |
| 405 | benign breast | Normal Breast | f | 40 | |
| 406 | brca | IDC | f | 42 | |
| 407 | brca | DCIS | f | — | |
| 408 | benign breast | Normal Breast | f | — | |
| 409 | brca | IDC | f | 58 | |
| 410 | brca | IDC | f | 70 | |
| 411 | brca | DCIS | f | 43 | |
| 412 | brca | DCIS | f | 83 | |
| 413 | brca | DCIS | f | 74 | |
| 414 | brca | DCIS | f | 28 | |
| 415 | benign breast | fibroadenoma | f | 38 | |
| 416 | benign breast | fibroadenoma | f | 39 | |
| 417 | benign breast | fibroadenoma | f | 39 | |
| 418 | benign breast | fibroadenoma | f | 38 | |
| 419 | benign breast | fibroadenoma | f | 51 | |
| 420 | benign breast | fibroadenoma | f | 58 | |
| 421 | benign breast | fibroadenoma | f | 50 | |
| 422 | benign breast | fibroadenoma | f | 58 | |
| 423 | benign breast | fibroadenoma | f | 39 | |
| 424 | benign breast | fibroadenoma | f | 41 | |
| 425 | benign breast | fibroadenoma | f | 15 | |
| 426 | benign breast | fibroadenoma | f | 42 | |
| 427 | benign breast | adenosis | f | 14 | |
| 428 | benign breast | fibroadenoma | f | 26 | |
| 429 | benign breast | Normal Breast | f | 31 | |
| 430 | benign breast | fibroadenoma | f | — | |
| 431 | benign breast | Normal Breast | f | 30 | |
| 432 | benign breast | fibroadenoma | f | 46 | |
| 433 | benign breast | fibroadenoma | f | 53 | |
| 434 | benign breast | fibroadenoma | f | 43 | |
| 435 | benign breast | fibroadenoma | f | 20 | |
| 436 | benign breast | fibroadenoma | f | 44 | |
| 437 | benign breast | Normal Breast | f | 45 | |
| 438 | benign breast | fibroadenoma | f | 27 | |
| 439 | benign breast | fibroadenoma | f | 63 | |
| 440 | benign breast | fibroadenoma | f | 44 | |
| 441 | benign breast | fibroadenoma | f | 40 | |
| 442 | benign breast | fibroadenoma | f | 45 | |
| 443 | benign breast | fibroadenoma | f | 41 | |
| 444 | benign breast | fibroadenoma | f | 41 | |
| 445 | benign breast | Normal Breast | f | 41 | |
| 446 | benign breast | fibroadenoma | f | 35 | |
| 447 | benign breast | fibroadenoma | f | 33 | |
| 448 | benign breast | fibroadenoma | f | — | |
| 449 | benign breast | fibroadenoma | f | 24 | |
| 450 | benign breast | fibroadenoma | f | — | |
| 451 | lymphocytes | lymphocytes | f | 77 | |
| 452 | lymphocytes | lymphocytes | m | 50 | |
| 453 | lymphocytes | lymphocytes | f | 74 | |
| 454 | other cancer | colorectal cancer | f | 0 | |
| 455 | other cancer | colorectal cancer | f | 0 | |
| 456 | lymphocytes | lymphocytes | f | 53 | |
| 457 | other cancer | colorectal cancer | f | 0 | |
| 458 | lymphocytes | lymphocytes | f | 72 | |
| 459 | other cancer | colorectal cancer | f | 0 | |
| 460 | other cancer | colorectal cancer | f | 0 | |
| 461 | lymphocytes | lymphocytes | f | 71 | |
| 462 | lymphocytes | lymphocytes | f | 69 | |
| 463 | lymphocytes | lymphocytes | f | 53 | |
| 464 | other cancer | colorectal cancer | f | 0 | |
| 465 | lymphocytes | lymphocytes | f | 51 | |
| 466 | other cancer | colorectal cancer | f | 0 | |
| 467 | lymphocytes | lymphocytes | f | 50 | |
| 468 | other cancer | colorectal cancer | f | 53 | |
| 469 | other cancer | colorectal cancer | f | 46 | |
| 470 | other cancer | colorectal cancer | f | 62 | |
| 471 | other cancer | colorectal cancer | f | 78 | |
| 472 | other cancer | colorectal cancer | f | 55 | |
| 473 | other cancer | colorectal cancer | f | 53 | |
| 474 | other cancer | colorectal cancer | f | 60 | |
| 475 | other cancer | colorectal cancer | f | 84 | |
| 476 | other cancer | colorectal cancer | f | 69 | |
| 477 | other cancer | colorectal cancer | f | 66 | |
| 478 | other cancer | colorectal cancer | f | NA | |
| 479 | other cancer | colorectal cancer | f | 45 | |
| 480 | other cancer | colorectal cancer | f | 75 | |
| 481 | other cancer | lung cancer | f | 69 | |
| 482 | other cancer | colorectal cancer | f | 73 | |
| 483 | other cancer | colorectal cancer | f | 73 | |
| 484 | other cancer | colorectal cancer | f | 72 | |
| 485 | other cancer | colorectal cancer | m | 72 | |
| 486 | other cancer | liver cancer | f | 66 | |
| 487 | other cancer | colorectal cancer | m | 88 | |
| 488 | other cancer | colorectal cancer | f | 65 | |
| 489 | other cancer | colorectal cancer | f | 54 | |
| 490 | other cancer | colorectal cancer | m | 76 | |
| 491 | other cancer | liver cancer | f | NA | |
| 492 | other cancer | stomach cancer | f | 82 | |
| 493 | other cancer | stomach cancer | f | 85 | |
| 494 | other cancer | stomach cancer | f | 60 | |
| 495 | other cancer | stomach cancer | f | 55 | |
| 496 | other cancer | stomach cancer | f | 56 | |
| 497 | other cancer | stomach cancer | f | 63 | |
| 498 | other cancer | cancer esophagus | f | 57 | |
| 499 | other cancer | cancer esophagus | f | 45 | |
| 500 | other cancer | cancer esophagus | f | 71 | |

TABLE 15
Sample grading

| Sample No. | T | N | M | grade | ER |
|---|---|---|---|---|---|
| 1 | | | | | |
| 2 | | | | | |
| 3 | | | | | |
| 4 | | | | | |
| 5 | | | | | |
| 6 | | | | | |
| 7 | | | | | |
| 8 | | | | | |
| 9 | | | | | |
| 10 | | | | | |
| 11 | | | | | |
| 12 | | | | | |
| 13 | | | | | |
| 14 | | | | | |
| 15 | | | | | |
| 16 | | | | | |
| 17 | | | | | |
| 18 | | | | | |
| 19 | | | | | |
| 20 | | | | | |
| 21 | | | | | |
| 22 | | | | | |
| 23 | | | | | |
| 24 | | | | | |
| 25 | | | | | |
| 26 | | | | | |
| 27 | | | | | |
| 28 | | | | | |
| 29 | | | | | |
| 30 | | | | | |
| 31 | | | | | |
| 32 | | | | | |
| 33 | | | | | |
| 34 | | | | | |
| 35 | | | | | |
| 36 | | | | | |
| 37 | | | | | |
| 38 | | | | | |
| 39 | | | | | |
| 40 | | | | | |
| 41 | | | | | |
| 42 | | | | | |
| 43 | | | | | |
| 44 | | | | | |
| 45 | | | | | |
| 46 | | | | | |
| 47 | | | | | |
| 48 | | | | | |
| 49 | | | | | |
| 50 | | | | | |
| 51 | | | | | |
| 52 | | | | | |
| 53 | | | | | |
| 54 | | | | | |
| 55 | | | | | |
| 56 | | | | | |
| 57 | | | | | |
| 58 | | | | | |
| 59 | | | | | |
| 60 | | | | | |
| 61 | | | | | |
| 62 | | | | | |
| 63 | | | | | |
| 64 | | | | | |
| 65 | | | | | |
| 66 | | | | | |
| 67 | | | | | |
| 68 | | | | | |
| 69 | | | | | |
| 70 | | | | | |
| 71 | | | | | |
| 72 | | | | | |
| 73 | | | | | |
| 74 | | | | | |
| 75 | | | | | |
| 76 | | | | | |
| 77 | | | | | |
| 78 | | | | | |
| 79 | | | | | |
| 80 | | | | | |
| 81 | | | | | |
| 82 | | | | | |
| 83 | | | | | |
| 84 | | | | | |
| 85 | | | | | |
| 86 | | | | | |
| 87 | | | | | |
| 88 | | | | | |
| 89 | | | | | |
| 90 | | | | | |
| 91 | | | | | |
| 92 | | | | | |
| 93 | | | | | |
| 94 | | | | | |
| 95 | | | | | |
| 96 | | | | | |
| 97 | | | | | |
| 98 | | | | | |
| 99 | | | | | |
| 100 | | | | | |
| 101 | | | | | |
| 102 | | | | | |
| 103 | | | | | |
| 104 | | | | | |
| 105 | | | | | |
| 106 | | | | | |
| 107 | | | | | |
| 108 | | | | | |
| 109 | | | | | |
| 110 | | | | | |
| 111 | | | | | |
| 112 | | | | | |
| 113 | | | | | |
| 114 | | | | | |
| 115 | T1 | N0 | M0 | poor | pos |
| 116 | T1 | N1 | M0 | poor | pos |
| 117 | T1 | N1 | M0 | | neg |
| 118 | T1 | N1 | M0 | | pos |
| 119 | T1 | N1 | M0 | poor | neg |
| 120 | T1 | N0 | M0 | poor | pos |
| 121 | T1 | N0 | M0 | poor | neg |
| 122 | T1 | N1 | M0 | poor | neg |
| 123 | T1 | N1 | M0 | poor | neg |
| 124 | T1 | N1 | M0 | poor | pos |
| 125 | T1 | N0 | M0 | poor | pos |
| 126 | T1 | N1 | M0 | poor | neg |
| 127 | T1 | N1 | M0 | poor | pos |
| 128 | T1 | N0 | M0 | poor | neg |
| 129 | T1 | N0 | M0 | poor | neg |
| 130 | T1 | N1 | M0 | | pos |
| 131 | T1 | N0 | M0 | | pos |
| 132 | T1 | N1 | M0 | mod | neg |
| 133 | T1 | N1 | M0 | poor | pos |
| 134 | T1 | N0 | M0 | mod | pos |
| 135 | T1 | N0 | M0 | poor | pos |
| 136 | T1 | N1 | M0 | poor | neg |
| 137 | T1 | N1 | M0 | | pos |
| 138 | T1 | N1 | M0 | mod | pos |
| 139 | T1 | N1 | M0 | mod | neg |
| 140 | T1 | N0 | M0 | | pos |
| 141 | T1 | N0 | M0 | | pos |
| 142 | T1 | N0 | M0 | | neg |
| 143 | T1 | N0 | M0 | | pos |
| 144 | T1 | N0 | M0 | | pos |
| 145 | T1 | N2 | M0 | poor | pos |
| 146 | T1 | N0 | M0 | mod | pos |
| 147 | T1 | N0 | M0 | poor | pos |
| 148 | T1 | N1 | M0 | poor | neg |
| 149 | T1 | N0 | M0 | mod | pos |
| 150 | T1 | N1 | M0 | | neg |
| 151 | T1 | N1 | M0 | poor | pos |
| 152 | T1 | N1 | M0 | poor | neg |
| 153 | T1 | N1 | M0 | poor | pos |
| 154 | T1 | N0 | M0 | poor | pos |
| 155 | T1 | N0 | M0 | | neg |
| 156 | T1 | N0 | M0 | poor | neg |
| 157 | T1 | N0 | M0 | | neg |
| 158 | T1 | N0 | M0 | poor | neg |
| 159 | T1 | N1 | M0 | | neg |
| 160 | T1 | N0 | M0 | poor | pos |
| 161 | T1 | N1 | M0 | poor | neg |
| 162 | T1 | N1 | M0 | | pos |
| 163 | T1 | N0 | M0 | | pos |
| 164 | T1 | N0 | M0 | poor | pos |
| 165 | T1 | N1 | M0 | poor | pos |
| 166 | T1 | N1 | M0 | poor | pos |
| 167 | T1 | N0 | M0 | poor | neg |
| 168 | T1 | N0 | M0 | poor | pos |
| 169 | T1 | N0 | M0 | poor | neg |
| 170 | T1 | N1 | M0 | poor | neg |
| 171 | T1 | N0 | M0 | poor | pos |
| 172 | T1 | N0 | M0 | poor | pos |
| 173 | T1 | N1 | M0 | | pos |
| 174 | T1 | N0 | M0 | poor | pos |
| 175 | T1 | N0 | M0 | | neg |
| 176 | T1 | N0 | M0 | | pos |
| 177 | T1 | N0 | M0 | | pos |
| 178 | T1 | N0 | M0 | mod | pos |
| 179 | T1 | N0 | M0 | poor | neg |
| 180 | T1 | N0 | M0 | poor | neg |
| 181 | T1 | N0 | M0 | poor | neg |
| 182 | T1 | N2 | M0 | | pos |
| 183 | T1 | N0 | M0 | poor | pos |
| 184 | T1 | N0 | M0 | | pos |
| 185 | T1 | N0 | M0 | | pos |
| 186 | T1 | N0 | M0 | | pos |
| 187 | T1 | N1 | M0 | | pos |
| 188 | T1 | N2 | M0 | poor | pos |
| 189 | T1 | N0 | M0 | | pos |
| 190 | T1 | N0 | M0 | poor | pos |
| 191 | T1 | N0 | M0 | | neg |
| 192 | T1 | N1 | M0 | poor | pos |
| 193 | T1 | N2 | M0 | poor | pos |
| 194 | T1 | N1 | M0 | | pos |
| 195 | T1 | N0 | M0 | poor | neg |
| 196 | T1 | N1 | M0 | | pos |
| 197 | T1 | N1 | M0 | | pos |
| 198 | T1 | N1 | M0 | good | neg |
| 199 | T1 | N1 | M0 | | neg |
| 200 | T1 | N0 | M0 | poor | neg |
| 201 | T1 | N0 | M0 | | neg |
| 202 | T1 | N1 | M0 | | pos |
| 203 | T1 | N0 | M0 | mod | pos |
| 204 | T1 | N0 | M0 | | pos |
| 205 | T1 | N0 | M0 | | pos |
| 206 | T1 | N0 | M0 | | neg |
| 207 | T1 | N1 | M0 | | neg |
| 208 | T1 | N1 | M0 | | pos |
| 209 | T1 | N1 | M0 | poor | pos |
| 210 | T1 | N1 | M0 | poor | neg |
| 211 | T1 | N1 | M0 | poor | neg |
| 212 | T1 | N1 | M0 | poor | pos |
| 213 | T1 | N1 | M0 | poor | neg |
| 214 | T1 | N1 | M0 | poor | pos |
| 215 | T1 | N1 | M0 | poor | neg |
| 216 | T1 | N2 | M0 | poor | neg |
| 217 | T1 | N1 | M0 | mod | pos |
| 218 | T1 | N1 | M0 | poor | neg |
| 219 | T1 | N1 | M0 | | pos |
| 220 | T1 | N0 | M0 | poor | neg |
| 221 | T1 | N0 | M0 | mod | pos |
| 222 | T1 | N0 | M0 | poor | neg |
| 223 | T1 | N0 | M0 | mod | pos |
| 224 | T1 | N0 | M0 | poor | neg |
| 225 | T1 | N0 | M0 | | neg |
| 226 | T1 | N0 | M0 | poor | neg |
| 227 | T1 | N1 | M0 | poor | pos |
| 228 | T1 | N0 | M0 | poor | neg |
| 229 | T1 | N0 | M0 | | pos |
| 230 | T1 | N1 | M0 | poor | pos |
| 231 | T1 | N1 | M0 | poor | neg |
| 232 | T1 | N0 | M0 | poor | neg |
| 233 | T1 | N2 | M0 | poor | pos |
| 234 | T1 | N1 | M0 | | pos |
| 235 | T1 | N0 | M0 | poor | pos |
| 236 | T1 | N1 | M0 | | pos |
| 237 | T1 | N0 | M0 | | pos |
| 238 | T1 | N2 | M0 | mod | pos |
| 239 | T1 | N0 | M0 | | pos |
| 240 | T1 | N0 | M0 | | neg |
| 241 | T1 | N0 | M0 | poor | pos |
| 242 | T1 | N1 | M0 | | pos |
| 243 | T1 | N0 | M0 | | pos |
| 244 | T1 | N1 | M0 | poor | pos |
| 245 | T1 | N0 | M0 | poor | pos |
| 246 | T1 | N2 | M0 | poor | pos |
| 247 | T1 | N1 | M0 | | pos |
| 248 | T1 | N0 | M0 | poor | neg |
| 249 | T1 | N0 | M0 | poor | neg |
| 250 | T1 | N1 | M0 | mod | neg |
| 251 | T1 | N1 | M0 | poor | pos |
| 252 | T1 | N1 | M0 | poor | neg |
| 253 | T1 | N0 | M0 | poor | pos |
| 254 | T1 | N1 | M0 | poor | neg |
| 255 | T1 | N1 | M0 | | pos |
| 256 | T1 | N0 | M0 | mod | pos |
| 257 | T1 | N1 | M0 | | pos |
| 258 | T1 | N1 | M0 | poor | pos |
| 259 | T1 | N1 | M0 | mod | pos |
| 260 | T1 | N0 | M0 | poor | pos |
| 261 | T1 | N0 | M0 | | pos |
| 262 | T1 | N0 | M0 | poor | neg |
| 263 | T1 | N0 | M0 | poor | pos |
| 264 | T1 | N1 | M0 | | neg |
| 265 | T1 | N0 | M0 | poor | neg |
| 266 | T1 | N1 | M0 | poor | pos |
| 267 | T1 | N0 | M0 | | neg |
| 268 | T1 | N1 | M0 | poor | pos |
| 269 | T1 | N1 | M0 | poor | pos |
| 270 | T1 | N0 | M0 | mod | pos |
| 271 | T1 | N1 | M0 | poor | pos |
| 272 | T1 | N0 | M0 | poor | pos |
| 273 | T1 | N1 | M0 | mod | neg |
| 274 | T1 | N1 | M0 | poor | neg |
| 275 | T1 | N1 | M0 | poor | pos |
| 276 | T1 | N1 | M0 | mod | pos |
| 277 | T1 | N0 | M0 | | pos |
| 278 | T1 | N0 | M0 | good | neg |
| 279 | T1 | N0 | M0 | poor | neg |
| 280 | T1 | N0 | M0 | | pos |
| 281 | T1 | N0 | M0 | mod | pos |
| 282 | T1 | N0 | M0 | mod | pos |
| 283 | T1 | N0 | M0 | poor | neg |
| 284 | T1 | N0 | M0 | poor | neg |
| 285 | T1 | N0 | M0 | poor | neg |
| 286 | T1 | N0 | M0 | poor | pos |
| 287 | T1 | N0 | M0 | | pos |
| 288 | T1 | N0 | M0 | poor | neg |
| 289 | T1 | N1 | M0 | poor | pos |
| 290 | T1 | N1 | M0 | poor | neg |
| 291 | T1 | N1 | M0 | poor | neg |
| 292 | T1 | N1 | M0 | poor | neg |
| 293 | T1 | N1 | M0 | poor | neg |
| 294 | T1 | N2 | M0 | poor | neg |
| 295 | T1 | N1 | M0 | poor | pos |
| 296 | T1 | N1 | M0 | mod | neg |
| 297 | T1 | N0 | M0 | | neg |
| 298 | T1 | N1 | M0 | | neg |
| 299 | T1 | N0 | M0 | | neg |
| 300 | T1 | N0 | M0 | poor | neg |
| 301 | T1 | N1 | M0 | | pos |
| 302 | T1 | N2 | M0 | poor | neg |
| 303 | T1 | N0 | M0 | mod | pos |
| 304 | T1 | N1 | M0 | poor | neg |
| 305 | T1 | N1 | M0 | poor | pos |
| 306 | T1 | N1 | M0 | | neg |
| 307 | T1 | N0 | M0 | mod | pos |
| 308 | T1 | N0 | M0 | poor | neg |
| 309 | T1 | N1 | M0 | poor | neg |
| 310 | T1 | N1 | M0 | poor | neg |
| 311 | T1 | N1 | M0 | | neg |
| 312 | T1 | N1 | M0 | | neg |
| 313 | T1 | N2 | M0 | poor | neg |
| 314 | T1 | N0 | M0 | | pos |
| 315 | T1 | N0 | M0 | mod | neg |
| 316 | T1 | N1 | M0 | poor | pos |
| 317 | T1 | N1 | M0 | poor | neg |
| 318 | T1 | N0 | M0 | mod | pos |
| 319 | T1 | N0 | M0 | poor | pos |
| 320 | T1 | N0 | M0 | | pos |
| 321 | T1 | N0 | M0 | mod | neg |
| 322 | T1 | N0 | M0 | poor | neg |
| 323 | T1 | N1 | M0 | | pos |
| 324 | T1 | N1 | M0 | poor | neg |
| 325 | T1 | N0 | M0 | good | pos |
| 326 | T1 | N0 | M0 | | pos |
| 327 | T1 | N0 | M0 | poor | neg |
| 328 | T1 | N0 | M0 | poor | neg |
| 329 | T1 | N1 | M0 | | pos |
| 330 | T1 | N0 | M0 | mod | pos |
| 331 | T1 | N1 | M0 | mod | pos |
| 332 | T1 | N1 | M0 | poor | neg |
| 333 | T1 | N0 | M0 | | neg |
| 334 | T1 | N0 | M0 | mod | neg |
| 335 | Tis | N0 | Mx | | pos |
| 336 | Tis | N0 | Mx | | |
| 337 | Tis | N0 | Mx | | |
| 338 | | | | | |
| 339 | | | | | |
| 340 | | | | | |
| 341 | | | | | |
| 342 | | | | | |
| 343 | | | | | |
| 344 | | | | | |
| 345 | | | | | |
| 346 | | | | | |
| 347 | | | | | |
| 348 | | | | | |
| 349 | | | | | |
| 350 | | | | | |
| 351 | | | | | |
| 352 | | | | | |
| 353 | T1 | N0 | M0 | poor | |
| 354 | | | | poor | |
| 355 | | | | | |
| 356 | T1 | N0 | M0 | poor | |
| 357 | T1 | N0 | M0 | 2e prim, unknown | |
| 358 | T1 | N0 | M0 | poor | |
| 359 | T1 | N0 | M0 | unknown | |
| 360 | T1 | N0 | M0 | | |
| 361 | T1 | N0 | M0 | poor | |
| 362 | T1 | N0 | M0 | | |
| 363 | T1 | N0 | M0 | LR | |
| 364 | T1 | N0 | M0 | poor | |
| 365 | T1 | N0 | M0 | poor | |
| 366 | T1 | N0 | M0 | poor | |
| 367 | T1 | N0 | M0 | | |
| 368 | T1 | N0 | M0 | | |
| 369 | T1 | N0 | M0 | | |
| 370 | T1 | N0 | M0 | missing | |
| 371 | T1 | N0 | M0 | poor | |
| 372 | T1 | N0 | M0 | poor | |
| 373 | T1 | N0 | M0 | mod | |
| 374 | T1 | N0 | M0 | poor | |
| 375 | T1 | N0 | M0 | | |
| 376 | | | | | |
| 377 | | | | | |
| 378 | | | | | |
| 379 | | | | | |
| 380 | | | | | |
| 381 | | | | | |
| 382 | | | | | |
| 383 | | | | poor | |
| 384 | | | | poor | |
| 385 | | | | | |
| 386 | | | | | |
| 387 | | | | | |
| 388 | | | | | |
| 389 | | | | poor | |
| 390 | | | | | |
| 391 | | | | | |
| 392 | | | | | |
| 393 | | | | | |
| 394 | | | | | |
| 395 | | | | | |
| 396 | | | | | |
| 397 | | | | | |
| 398 | | | | | |
| 399 | | | | | |
| 400 | | | | | |
| 401 | | | | | |
| 402 | | | | | |
| 403 | | | | | |
| 404 | | | | | |
| 405 | | | | | |
| 406 | | | | LR, poor | |
| 407 | | | | | |
| 408 | | | | | |
| 409 | | | | | |
| 410 | | | | | |
| 411 | | | | | |
| 412 | | | | | |
| 413 | | | | | |
| 414 | | | | poor | |
| 415 | | | | | |
| 416 | | | | | |
| 417 | | | | | |
| 418 | | | | | |
| 419 | | | | | |
| 420 | | | | | |
| 421 | | | | | |
| 422 | | | | | |
| 423 | | | | | |
| 424 | | | | | |
| 425 | | | | | |
| 426 | | | | | |
| 427 | | | | | |
| 428 | | | | | |
| 429 | | | | | |
| 430 | | | | | |
| 431 | | | | | |
| 432 | | | | | |
| 433 | | | | | |
| 434 | | | | | |
| 435 | | | | | |
| 436 | | | | | |
| 437 | | | | | |
| 438 | | | | | |
| 439 | | | | | |
| 440 | | | | | |
| 441 | | | | | |
| 442 | | | | | |
| 443 | | | | | |
| 444 | | | | | |
| 445 | | | | | |
| 446 | | | | | |
| 447 | | | | | |
| 448 | | | | | |
| 449 | | | | | |
| 450 | | | | | |
| 451 | | | | | |
| 452 | | | | | |
| 453 | | | | | |
| 454 | | | | | |
| 455 | | | | | |
| 456 | | | | | |
| 457 | | | | | |
| 458 | | | | | |
| 459 | | | | | |
| 460 | | | | | |
| 461 | | | | | |
| 462 | | | | | |
| 463 | | | | | |
| 464 | | | | | |
| 465 | | | | | |
| 466 | | | | | |
| 467 | | | | | |
| 468 | | | | | |
| 469 | | | | | |
| 470 | | | | | |
| 471 | | | | | |
| 472 | | | | | |
| 473 | | | | | |
| 474 | | | | | |
| 475 | | | | | |
| 476 | | | | | |
| 477 | | | | | |
| 478 | | | | | |
| 479 | | | | | |
| 480 | | | | | |
| 481 | | | | | |
| 482 | | | | | |
| 483 | | | | | |
| 484 | | | | | |
| 485 | | | | | |
| 486 | | | | | |
| 487 | | | | | |
| 488 | | | | | |
| 489 | | | | | |
| 490 | | | | | |
| 491 | | | | | |
| 492 | | | | | |
| 493 | | | | | |
| 494 | | | | | |
| 495 | | | | | |
| 496 | | | | | |
| 497 | | | | | |
| 498 | | | | | |
| 499 | | | | | |
| 500 | | | | | |

TABLE 16
Breast cancer vs. all other controls

| | | |
|---|---|---|
| No: | Gene | Oligo: |

| | | |
|---|---|---|
| 1 | SCGB3A1 (SEQ ID NO: 115) | TAGTGTTCGACGTTGT (SEQ ID NO: 1475) |
| 2 | SCGB3A1 (SEQ ID NO: 115) | TAGTGTTTGATGTTGTT (SEQ ID NO: 1476) |
| 3 | SASH1 (SEQ ID NO: 102) | TAGATTCGAGGTGCGG (SEQ ID NO: 1477) |
| 4 | SASH1 (SEQ ID NO: 102) | TAGATTTGAGGTGTGG (SEQ ID NO: 1478) |
| 5 | SASH1 (SEQ ID NO: 102) | TAGATTCGAGGTGCGG (SEQ ID NO: 1477) |
| 6 | SASH1 (SEQ ID NO: 102) | TAGATTTGAGGTGTGG (SEQ ID NO: 1478) |
| 7 | SASH1 (SEQ ID NO: 102) | ATTCGGTATTCGGGTAG (SEQ ID NO: 1479) |
| 8 | SASH1 (SEQ ID NO: 102) | ATTTGGTATTTGGGTAG (SEQ ID NO: 1480) |
| 9 | SASH1 (SEQ ID NO: 102) | ATTCGGTATTCGGGTAG (SEQ ID NO: 1479) |
| 10 | SASH1 (SEQ ID NO: 102) | ATTTGGTATTTGGGTAG (SEQ ID NO: 1480) |
| 11 | SASH1 (SEQ ID NO: 102) | AGTCGGAATCGGAGTT (SEQ ID NO: 1481) |
| 12 | SASH1 (SEQ ID NO: 102) | GTTGGAATTGGAGTTTA (SEQ ID NO: 1482) |
| 13 | ARH1/NOEY2 (SEQ ID NO: 97) | TGTTATCGTTAACGATT (SEQ ID NO: 1483) |
| 14 | ARH1/NOEY2 (SEQ ID NO: 97) | AGGTGTTATTGTTAATGA (SEQ ID NO: 1484) |
| 15 | ARH1/NOEY2 (SEQ ID NO: 97) | TAAAACGTTCGGTAGG (SEQ ID NO: 1485) |
| 16 | ARH1/NOEY2 (SEQ ID NO: 97) | TTTAAAATGTTTGGTAGG (SEQ ID NO: 1486) |
| 17 | ARH1/NOEY2 (SEQ ID NO: 97) | TGTATTCGTCGTTAGG (SEQ ID NO: 1487) |
| 18 | ARH1/NOEY2 (SEQ ID NO: 97) | AATGTATTTGTTGTTAGG (SEQ ID NO: 1488) |
| 19 | ARH1/NOEY2 (SEQ ID NO: 97) | TTAGACGGAGTTCGGA (SEQ ID NO: 1489) |
| 20 | ARH1/NOEY2 (SEQ ID NO: 97) | TAGATGGAGTTTGGAGA (SEQ ID NO: 1490) |
| 21 | ARH1/NOEY2 (SEQ ID NO: 97) | TAGACGTAGGCGTATT (SEQ ID NO: 1491) |
| 22 | ARH1/NOEY2 (SEQ ID NO: 97) | GGGTAGATGTAGGTGT (SEQ ID NO: 1492) |
| 23 | CCND2 (SEQ ID NO: 104) | TTAGGGTCGATCGTGT (SEQ ID NO: 1493) |
| 24 | CCND2 (SEQ ID NO: 104) | TAGGGTTGATTGTGTT (SEQ ID NO: 1494) |
| 25 | CCND2 (SEQ ID NO: 104) | TTATCGTAGTCGGTTT (SEQ ID NO: 1495) |
| 26 | CCND2 (SEQ ID NO: 104) | GATTTTATTGTAGTTGGT (SEQ ID NO: 1496) |
| 27 | CCND2 (SEQ ID NO: 104) | GAGTGAGGCGCGAAAT (SEQ ID NO: 1497) |
| 28 | CCND2 (SEQ ID NO: 104) | GAGTGAGGTGTGAAAT (SEQ ID NO: 1498) |
| 29 | CCND2 (SEQ ID NO: 104) | GAGTGAGGCGCGAAAT (SEQ ID NO: 1497) |
| 30 | CCND2 (SEQ ID NO: 104) | GAGTGAGGTGTGAAAT (SEQ ID NO: 1498) |
| 31 | CCND2 (SEQ ID NO: 104) | AAGGATCGAGCGTGGA (SEQ ID NO: 1499) |
| 32 | CCND2 (SEQ ID NO: 104) | AAGGATTGAGTGTGGA (SEQ ID NO: 1500) |
| 33 | CCND2 (SEQ ID NO: 104) | AAGGATCGAGCGTGGA (SEQ ID NO: 1499) |
| 34 | CCND2 (SEQ ID NO: 104) | AAGGATTGAGTGTGGA (SEQ ID NO: 1500) |
| 35 | CDKN1A (SEQ ID NO: 67) | ATTAGGGTCGCGTTGA (SEQ ID NO: 1501) |
| 36 | CDKN1A (SEQ ID NO: 67) | ATTAGGGTTGTGTTGA (SEQ ID NO: 1502) |
| 37 | CDKN1A (SEQ ID NO: 67) | ATTAGGGTCGCGTTGA (SEQ ID NO: 1501) |
| 38 | CDKN1A (SEQ ID NO: 67) | ATTAGGGTTGTGTTGA (SEQ ID NO: 1502) |
| 39 | CDKN2A (SEQ ID NO: 57) | GGCGTTGTTTAACGTAT (SEQ ID NO: 1503) |
| 40 | CDKN2A (SEQ ID NO: 57) | GGGTGTTGTTTAATGTA (SEQ ID NO: 1504) |
| 41 | CDKN2A (SEQ ID NO: 57) | AATAGTTACGGTCGGA (SEQ ID NO: 1505) |
| 42 | CDKN2A (SEQ ID NO: 57) | AGTTATGGTTGGAGGT (SEQ ID NO: 1506) |
| 43 | CDKN2A (SEQ ID NO: 57) | GTCGGAGGTCGATTTA (SEQ ID NO: 1507) |
| 44 | CDKN2A (SEQ ID NO: 57) | GGTTGGAGGTTGATTTA (SEQ ID NO: 1508) |
| 45 | DAPK1 (SEQ ID NO: 98) | TTTCGGAGATTCGGTT (SEQ ID NO: 1509) |
| 46 | DAPK1 (SEQ ID NO: 98) | TTTGGAGATTTGGTTTT (SEQ ID NO: 1510) |
| 47 | DAPK1 (SEQ ID NO: 98) | TTTTAGCGTCGGGGAG (SEQ ID NO: 1511) |
| 48 | DAPK1 (SEQ ID NO: 98) | TTTTAGTGTTGGGGAG (SEQ ID NO: 1512) |
| 49 | DAPK1 (SEQ ID NO: 98) | TTTTAGCGTCGGGGAG (SEQ ID NO: 1511) |
| 50 | DAPK1 (SEQ ID NO: 98) | TTTTAGTGTTGGGGAG (SEQ ID NO: 1512) |
| 51 | EYA4 (SEQ ID NO: 58) | GGTATAAAATCGTAAATTTT (SEQ ID NO: |
| | | 1513) |
| 52 | EYA4 (SEQ ID NO: 58) | GGGTATAAAATTGTAAATTT (SEQ ID NO: |
| | | 1514) |
| 53 | EYA4 (SEQ ID NO: 58) | TATGTAGTCGCGTAGT (SEQ ID NO: 1515) |
| 54 | EYA4 (SEQ ID NO: 58) | TTTATGTAGTTGTGTAGT (SEQ ID NO: 1516) |
| 55 | EYA4 (SEQ ID NO: 58) | GTTTAGATACGAAATGTT (SEQ ID NO: 1517) |
| 56 | EYA4 (SEQ ID NO: 58) | GTTTAGATATGAAATGTTAT (SEQ ID NO: |
| | | 1518) |
| 57 | EYA4 (SEQ ID NO: 58) | AGTTTTGACGTCGTTT (SEQ ID NO: 1519) |
| 58 | EYA4 (SEQ ID NO: 58) | TTGATGTTGTTTTGGAA (SEQ ID NO: 1520) |
| 59 | FHIT (SEQ ID NO: 76) | GTTACGTTAGCGGGTT (SEQ ID NO: 1521) |
| 60 | FHIT (SEQ ID NO: 76) | GGTTATGTTAGTGGGT (SEQ ID NO: 1522) |
| 61 | FHIT (SEQ ID NO: 76) | TTCGGGGACGTTATAG (SEQ ID NO: 1523) |
| 62 | FHIT (SEQ ID NO: 76) | GGTTTGGGGATGTTAT (SEQ ID NO: 1524) |
| 63 | GSTP1 (SEQ ID NO: 59) | GGCGATTTCGGGGATT (SEQ ID NO: 1525) |
| 64 | GSTP1 (SEQ ID NO: 59) | GGTGATTTTGGGGATTT (SEQ ID NO: 1526) |
| 65 | GSTP1 (SEQ ID NO: 59) | GACGTTCGGGGTGTAG (SEQ ID NO: 1527) |
| 66 | GSTP1 (SEQ ID NO: 59) | GATGTTTGGGGTGTAG (SEQ ID NO: 1528) |
| 67 | GSTP1 (SEQ ID NO: 59) | GACGTTCGGGGTGTAG (SEQ ID NO: 1527) |
| 68 | GSTP1 (SEQ ID NO: 59) | GATGTTTGGGGTGTAG (SEQ ID NO: 1528) |
| 69 | GSTP1 (SEQ ID NO: 59) | AGTTCGCGGGATTTTT (SEQ ID NO: 1529) |
| 70 | GSTP1 (SEQ ID NO: 59) | GGAGTTTGTGGGATTT (SEQ ID NO: 1530) |
| 71 | GSTP1 (SEQ ID NO: 59) | AGTTTTCGTTATTAGTGA (SEQ ID NO: 1531) |
| 72 | GSTP1 (SEQ ID NO: 59) | TAGTTTTTGTTATTAGTGA (SEQ ID NO: 1532) |
| 73 | HIC1 (SEQ ID NO: 85) | TATCGAAGTTTTCGGG (SEQ ID NO: 1533) |
| 74 | HIC1 (SEQ ID NO: 85) | TATTGAAGTTTTTGGGT (SEQ ID NO: 1534) |
| 75 | HIC1 (SEQ ID NO: 85) | TAGCGGTTATTTCGGT (SEQ ID NO: 1535) |
| 76 | HIC1 (SEQ ID NO: 85) | TTTAGTGGTTATTTTGGT (SEQ ID NO: 1536) |
| 77 | HIC1 (SEQ ID NO: 85) | TACGTTTTTCGTAGCGT (SEQ ID NO: 1537) |
| 78 | HIC1 (SEQ ID NO: 85) | ATTATGTTTTTTGTAGTGT (SEQ ID NO: 1538) |
| 79 | HIC1 (SEQ ID NO: 85) | TTCGGTTTTGTCGTATA (SEQ ID NO: 1539) |
| 80 | HIC1 (SEQ ID NO: 85) | TTTGGTTTTGTTGTATAG (SEQ ID NO: 1540) |
| 81 | MLH1 (SEQ ID NO: 89) | AGGCGGCGATAGATTA (SEQ ID NO: 1541) |
| 82 | MLH1 (SEQ ID NO: 89) | ATGAGGTGGTGATAGA (SEQ ID NO: 1542) |
| 83 | PGR (SEQ ID NO: 83) | TTTCGAGGTCGGATTT (SEQ ID NO: 1543) |
| 84 | PGR (SEQ ID NO: 83) | TTTGAGGTTGGATTTTT (SEQ ID NO: 1544) |
| 85 | PGR (SEQ ID NO: 83) | GTGTCGTTTAGTCGTA (SEQ ID NO: 1545) |
| 86 | PGR (SEQ ID NO: 83) | GTTGTTTAGTTGTAGGT (SEQ ID NO: 1546) |
| 87 | PGR (SEQ ID NO: 83) | TTTTTTCGACGAAAAGA (SEQ ID NO: 1547) |
| 88 | PGR (SEQ ID NO: 83) | AGGATTTTTTTGATGAAA (SEQ ID NO: 1548) |
| 89 | SERPINB5 (SEQ ID NO: 68) | TTATTAACGTGTTTGAGA (SEQ ID NO: 1549) |
| 90 | SERPINB5 (SEQ ID NO: 68) | TTATTAATGTGTTTGAGAA (SEQ ID NO: 1550) |
| 91 | SERPINB5 (SEQ ID NO: 68) | ATTGTCGTACGTATGT (SEQ ID NO: 1551) |
| 92 | SERPINB5 (SEQ ID NO: 68) | AGAGGATTGTTGTATGTA (SEQ ID NO: 1552) |
| 93 | SERPINB5 (SEQ ID NO: 68) | TTTTTTGTTCGAATATGT (SEQ ID NO: 1553) |
| 94 | SERPINB5 (SEQ ID NO: 68) | TTTGTTTGAATATGTTGG (SEQ ID NO: 1554) |
| 95 | RARB (SEQ ID NO: 88) | ATGTCGAGAACGCGAG (SEQ ID NO: 1555) |
| 96 | RARB (SEQ ID NO: 88) | GGATGTTGAGAATGTGA (SEQ ID NO: 1556) |
| 97 | RARB (SEQ ID NO: 88) | AGCGATTCGAGTAGGG (SEQ ID NO: 1557) |
| 98 | RARB (SEQ ID NO: 88) | AGTGATTTGAGTAGGG (SEQ ID NO: 1558) |
| 99 | RARB (SEQ ID NO: 88) | AGCGATTCGAGTAGGG (SEQ ID NO: 1557) |
| 100 | RARB (SEQ ID NO: 88) | AGTGATTTGAGTAGGG (SEQ ID NO: 1558) |
| 101 | RARB (SEQ ID NO: 88) | TAGGATTCGGAACGTA (SEQ ID NO: 1559) |
| 102 | RARB (SEQ ID NO: 88) | GGTAGGATTTGGAATGT (SEQ ID NO: 1560) |
| 103 | SFN (SEQ ID NO: 69) | TAGTACGGTGTCGTAT (SEQ ID NO: 1561) |
| 104 | SFN (SEQ ID NO: 69) | GTTTAGTATGGTGTTGT (SEQ ID NO: 1562) |
| 105 | SFN (SEQ ID NO: 69) | TACGTATTTCGGGTTT (SEQ ID NO: 1563) |
| 106 | SFN (SEQ ID NO: 69) | TATTTATGTATTTTGGGTT (SEQ ID NO: 1564) |
| 107 | SFN (SEQ ID NO: 69) | TTCGTTTTTCGTAGGAG (SEQ ID NO: 1565) |
| 108 | SFN (SEQ ID NO: 69) | TTTGTTTTTTGTAGGAGA (SEQ ID NO: 1566) |
| 109 | TGFBR2 (SEQ ID NO: 93) | ATGGGGCGGACGAATA (SEQ ID NO: 1567) |
| 110 | TGFBR2 (SEQ ID NO: 93) | ATGGGGTGGATGAATA (SEQ ID NO: 1568) |
| 111 | TGFBR2 (SEQ ID NO: 93) | ATGGGGCGGACGAATA (SEQ ID NO: 1567) |
| 112 | TGFBR2 (SEQ ID NO: 93) | ATGGGGTGGATGAATA (SEQ ID NO: 1568) |
| 113 | THRB (SEQ ID NO: 106) | GGGCGGTTAAGTCGAG (SEQ ID NO: 1569) |
| 114 | THRB (SEQ ID NO: 106) | GGGTGGTTAAGTTGAG (SEQ ID NO: 1570) |
| 115 | THRB (SEQ ID NO: 106) | GGGCGGTTAAGTCGAG (SEQ ID NO: 1569) |
| 116 | THRB (SEQ ID NO: 106) | GGGTGGTTAAGTTGAG (SEQ ID NO: 1570) |
| 117 | TIMP3 (SEQ ID NO: 103) | TTATTAACGGAGGAAGG (SEQ ID NO: 1571) |
| 118 | TIMP3 (SEQ ID NO: 103) | TATTAATGGAGGAAGGG (SEQ ID NO: 1572) |
| 119 | TIMP3 (SEQ ID NO: 103) | TTCGTTATGTGTACGGAA (SEQ ID NO: 1573) |
| 120 | TIMP3 (SEQ ID NO: 103) | TTTGTTATGTGTATGGAA (SEQ ID NO: 1574) |
| 121 | TIMP3 (SEQ ID NO: 103) | TTCGTTATGTGTACGGAA (SEQ ID NO: 1573) |
| 122 | TIMP3 (SEQ ID NO: 103) | TTTGTTATGTGTATGGAA (SEQ ID NO: 1574) |
| 123 | TIMP3 (SEQ ID NO: 103) | GAGTATTTCGAGTTTGT (SEQ ID NO: 1575) |
| 124 | TIMP3 (SEQ ID NO: 103) | AGTATTTTGAGTTTGTATT (SEQ ID NO: 1576) |
| 125 | TIMP3 (SEQ ID NO: 103) | TAAGCGTTAATCGAGT (SEQ ID NO: 1577) |
| 126 | TIMP3 (SEQ ID NO: 103) | TAGGTAAGTGTTAATTGA (SEQ ID NO: 1578) |
| 127 | TP73 (SEQ ID NO: 86) | TAGGATTCGCGTTTTT (SEQ ID NO: 1579) |
| 128 | TP73 (SEQ ID NO: 86) | GGTAGGATTTGTGTTTT (SEQ ID NO: 1580) |
| 129 | TP73 (SEQ ID NO: 86) | TTTCGGAGTTGCGAGT (SEQ ID NO: 1581) |
| 130 | TP73 (SEQ ID NO: 86) | TAGTTTTGGAGTTGTGA (SEQ ID NO: 1582) |
| 131 | CDH13 (SEQ ID NO: 70) | TAAAACGAGGGAGCGT (SEQ ID NO: 1583) |
| 132 | CDH13 (SEQ ID NO: 70) | AAAATGAGGGAGTGTT (SEQ ID NO: 1584) |
| 133 | CDH13 (SEQ ID NO: 70) | TAGTCGCGTGTATGAA (SEQ ID NO: 1585) |
| 134 | CDH13 (SEQ ID NO: 70) | TGTAGTTGTGTGTATGA (SEQ ID NO: 1586) |
| 135 | CDH13 (SEQ ID NO: 70) | ATGAAAACGTCGTCGG (SEQ ID NO: 1587) |
| 136 | CDH13 (SEQ ID NO: 70) | AATGAAAATGTTGTTGG (SEQ ID NO: 1588) |
| 137 | CDH13 (SEQ ID NO: 70) | TAGTCGAGAATTTCGT (SEQ ID NO: 1589) |
| 138 | CDH13 (SEQ ID NO: 70) | TGTAGTTGAGAATTTTGT (SEQ ID NO: 1590) |
| 139 | TMS1/ASC (SEQ ID NO: 84) | TTCGTTTCGGAGTCGA (SEQ ID NO: 1591) |
| 140 | TMS1/ASC (SEQ ID NO: 84) | TTTGTTTTGGAGTTGAT (SEQ ID NO: 1592) |
| 141 | APAF1 (SEQ ID NO: 82) | GTGTCGTAGCGGTATT (SEQ ID NO: 1593) |
| 142 | APAF1 (SEQ ID NO: 82) | GGTGTTGTAGTGGTAT (SEQ ID NO: 1594) |
| 143 | APAF1 (SEQ ID NO: 82) | AGTAGCGTCGGGTTTT (SEQ ID NO: 1595) |
| 144 | APAF1 (SEQ ID NO: 82) | GAGTAGTGTTGGGTTT (SEQ ID NO: 1596) |
| 145 | SYK (SEQ ID NO: 60) | GAAGTTATCGCGTTGG (SEQ ID NO: 1597) |
| 146 | SYK (SEQ ID NO: 60) | AGAAGTTATTGTGTTGG (SEQ ID NO: 1598) |
| 147 | SYK (SEQ ID NO: 60) | GATCGATGCGGTTTAT (SEQ ID NO: 1599) |
| 148 | SYK (SEQ ID NO: 60) | GGGATTGATGTGGTTT (SEQ ID NO: 1600) |
| 149 | SYK (SEQ ID NO: 60) | GGCGTTTTAGTCGATT (SEQ ID NO: 1601) |
| 150 | SYK (SEQ ID NO: 60) | GGTGTTTTAGTTGATTTT (SEQ ID NO: 1602) |
| 151 | SYK (SEQ ID NO: 60) | TTATTCGGTCGGGATT (SEQ ID NO: 1603) |
| 152 | SYK (SEQ ID NO: 60) | TTTATTTGGTTGGGATT (SEQ ID NO: 1604) |
| 153 | FABP3 (SEQ ID NO: 77) | GATGGGCGTATTAGTT (SEQ ID NO: 1605) |
| 154 | FABP3 (SEQ ID NO: 77) | GGGATGGGTGTATTAG (SEQ ID NO: 1606) |
| 155 | FABP3 (SEQ ID NO: 77) | GTGATGCGAGGGTTAT (SEQ ID NO: 1607) |
| 156 | FABP3 (SEQ ID NO: 77) | GTGATGTGAGGGTTAT (SEQ ID NO: 1608) |
| 157 | FABP3 (SEQ ID NO: 77) | GTGATGCGAGGGTTAT (SEQ ID NO: 1607) |
| 158 | FABP3 (SEQ ID NO: 77) | GTGATGTGAGGGTTAT (SEQ ID NO: 1608) |
| 159 | FABP3 (SEQ ID NO: 77) | TAAAGCGGTAGTTCGG (SEQ ID NO: 1609) |
| 160 | FABP3 (SEQ ID NO: 77) | AAGTGGTAGTTTGGGT (SEQ ID NO: 1610) |
| 161 | FABP3 (SEQ ID NO: 77) | TATTGGCGTTGACGTA (SEQ ID NO: 1611) |
| 162 | FABP3 (SEQ ID NO: 77) | TGGTGTTGATGTAGGT (SEQ ID NO: 1612) |
| 163 | RASSF1A (SEQ ID NO: 90) | TACGGGTATTTTCGCGT (SEQ ID NO: 1613) |
| 164 | RASSF1A (SEQ ID NO: 90) | ATATGGGTATTTTTGTGT (SEQ ID NO: 1614) |
| 165 | RASSF1A (SEQ ID NO: 90) | AGAGCGCGTTTAGTTT (SEQ ID NO: 1615) |
| 166 | RASSF1A (SEQ ID NO: 90) | GAGAGTGTGTTTAGTTT (SEQ ID NO: 1616) |
| 167 | RASSF1A (SEQ ID NO: 90) | AGTAAATCGGATTAGGA (SEQ ID NO: 1617) |
| 168 | RASSF1A (SEQ ID NO: 90) | AGTAAATTGGATTAGGAG (SEQ ID NO: 1618) |
| 169 | TWIST (SEQ ID NO: 100) | AGTAAAGGCGTTGCGT (SEQ ID NO: 1619) |
| 170 | TWIST (SEQ ID NO: 100) | AGTAAAGGTGTTGTGT (SEQ ID NO: 1620) |
| 171 | TWIST (SEQ ID NO: 100) | AGTAAAGGCGTTGCGT (SEQ ID NO: 1619) |
| 172 | TWIST (SEQ ID NO: 100) | AGTAAAGGTGTTGTGT (SEQ ID NO: 1620) |
| 173 | TWIST (SEQ ID NO: 100) | TATTTTTCGAGGCGTA (SEQ ID NO: 1621) |
| 174 | TWIST (SEQ ID NO: 100) | TTTTGAGGTGTAGTTTT (SEQ ID NO: 1622) |
| 175 | TWIST (SEQ ID NO: 100) | ATTGGGTCGTTGTAGA (SEQ ID NO: 1623) |
| 176 | TWIST (SEQ ID NO: 100) | ATTGGGTTGTTGTAGA (SEQ ID NO: 1624) |
| 177 | TWIST (SEQ ID NO: 100) | ATTGGGTCGTTGTAGA (SEQ ID NO: 1623) |
| 178 | TWIST (SEQ ID NO: 100) | ATTGGGTTGTTGTAGA (SEQ ID NO: 1624) |
| 179 | TWIST (SEQ ID NO: 100) | TAGGTCGGGACGTAAA (SEQ ID NO: 1625) |
| 180 | TWIST (SEQ ID NO: 100) | AGTAGGTTGGGATGTA (SEQ ID NO: 1626) |
| 181 | ESR2 (SEQ ID NO: 91) | GAGTATTTTCGAATCGA (SEQ ID NO: 1627) |
| 182 | ESR2 (SEQ ID NO: 91) | GGAGTATTTTTGAATTGA (SEQ ID NO: 1628) |
| 183 | ESR2 (SEQ ID NO: 91) | ATAAGCGATTTAACGAT (SEQ ID NO: 1629) |
| 184 | ESR2 (SEQ ID NO: 91) | AAGTGATTTAATGATAAGT (SEQ ID NO: 1630) |
| 185 | ESR2 (SEQ ID NO: 91) | TTTACGTGATCGAGTT (SEQ ID NO: 1631) |
| 186 | ESR2 (SEQ ID NO: 91) | AGTTTATGTGATTGAGTT (SEQ ID NO: 1632) |
| 187 | PLAU (SEQ ID NO: 62) | TATTTGTCGCGTTGAT (SEQ ID NO: 1633) |
| 188 | PLAU (SEQ ID NO: 62) | ATTTGTTGTGTTGATGA (SEQ ID NO: 1634) |
| 189 | PLAU (SEQ ID NO: 62) | TGTAATTCGGGGATTT (SEQ ID NO: 1635) |
| 190 | PLAU (SEQ ID NO: 62) | TTGTAATTTGGGGATTT (SEQ ID NO: 1636) |
| 191 | PLAU (SEQ ID NO: 62) | TTGGAGATCGCGTTTT (SEQ ID NO: 1637) |
| 192 | PLAU (SEQ ID NO: 62) | TTGGAGATTGTGTTTTT (SEQ ID NO: 1638) |
| 193 | PLAU (SEQ ID NO: 62) | GAGCGTTGCGGAAGTA (SEQ ID NO: 1639) |
| 194 | PLAU (SEQ ID NO: 62) | GAGTGTTGTGGAAGTA (SEQ ID NO: 1640) |
| 195 | PLAU (SEQ ID NO: 62) | GAGCGTTGCGGAAGTA (SEQ ID NO: 1639) |
| 196 | PLAU (SEQ ID NO: 62) | GAGTGTTGTGGAAGTA (SEQ ID NO: 1640) |
| 197 | STAT1 (SEQ ID NO: 109) | GTTATTTTCGAGAGTTG (SEQ ID NO: 1641) |
| 198 | STAT1 (SEQ ID NO: 109) | GTTATTTTTGAGAGTTGT (SEQ ID NO: 1642) |
| 199 | BRCA1 (SEQ ID NO: 66) | AGTTTCGAGAGACGTT (SEQ ID NO: 1643) |
| 200 | BRCA1 (SEQ ID NO: 66) | AGAGTTTTGAGAGATGT (SEQ ID NO: 1644) |
| 201 | BRCA1 (SEQ ID NO: 66) | TTTCGTGGTAACGGAA (SEQ ID NO: 1645) |
| 202 | BRCA1 (SEQ ID NO: 66) | TTTGTGGTAATGGAAAA (SEQ ID NO: 1646) |
| 203 | BRCA1 (SEQ ID NO: 66) | AAAGCGCGGGAATTAT (SEQ ID NO: 1647) |
| 204 | BRCA1 (SEQ ID NO: 66) | GGAAAAGTGTGGGAAT (SEQ ID NO: 1648) |
| 205 | LOT1 (SEQ ID NO: 95) | ATGGGTACGTTTAAGG (SEQ ID NO: 1649) |
| 206 | LOT1 (SEQ ID NO: 95) | TGGGTATGTTTAAGGG (SEQ ID NO: 1650) |
| 207 | LOT1 (SEQ ID NO: 95) | AAATTAGTTACGTTATTTAA (SEQ ID NO: |
| | | 1651) |
| 208 | LOT1 (SEQ ID NO: 95) | TGAAATTAGTTATGTTATTTA (SEQ ID NO: |
| | | 1652) |
| 209 | LOT1 (SEQ ID NO: 95) | ATGTCGGTTATTACGT (SEQ ID NO: 1653) |
| 210 | LOT1 (SEQ ID NO: 95) | TGTTGGTTATTATGTAGA (SEQ ID NO:. 1654) |
| 211 | PRSS8 (SEQ ID NO: 72) | AGTTGGCGGAGTTTAG (SEQ ID NO: 1655) |
| 212 | PRSS8 (SEQ ID NO: 72) | AGTTGGTGGAGTTTAG (SEQ ID NO: 1656) |
| 213 | PRSS8 (SEQ ID NO: 72) | AGTTGGCGGAGTTTAG (SEQ ID NO: 1655) |
| 214 | PRSS8 (SEQ ID NO: 72) | AGTTGGTGGAGTTTAG (SEQ ID NO: 1656) |
| 215 | PRSS8 (SEQ ID NO: 72) | TTGGTGATTCGTTTATAT (SEQ ID NO: 1657) |
| 216 | PRSS8 (SEQ ID NO: 72) | GTTGGTGATTTGTTTATA (SEQ ID NO: 1658) |
| 217 | PRSS8 (SEQ ID NO: 72) | TGTTCGTTTCGGATAT (SEQ ID NO: 1659) |
| 218 | PRSS8 (SEQ ID NO: 72) | TTTGTTTTGGATATTTTAG (SEQ ID NO: 1660) |
| 219 | TPM1 (SEQ ID NO: 110) | TTGATTCGCGTTCGTA (SEQ ID NO: 1661) |
| 220 | TPM1 (SEQ ID NO: 110) | TGATTTGTGTTTGTAGA (SEQ ID NO: 1662) |
| 221 | SLC19A1 (SEQ ID NO: 116) | GTCGTGCGGTTTTTAA (SEQ ID NO: 1663) |
| 222 | SLC19A1 (SEQ ID NO: 116) | GGTTGTGTGGTTTTTAA (SEQ ID NO: 1664) |
| 223 | SLC19A1 (SEQ ID NO: 116) | TTACGAAGGCGGTTTA (SEQ ID NO: 1665) |
| 224 | SLC19A1 (SEQ ID NO: 116) | TTTTATGAAGGTGGTTT (SEQ ID NO: 1666) |
| 225 | GJB2 (SEQ ID NO: 111) | GGATTTCGTCGGTATT (SEQ ID NO: 1667) |
| 226 | GJB2 (SEQ ID NO: 111) | GGGGATTTTGTTGGTA (SEQ ID NO: 1668) |
| 227 | GJB2 (SEQ ID NO: 111) | GAATTTCGTTTACGGT (SEQ ID NO: 1669) |
| 228 | GJB2 (SEQ ID NO: 111) | TTGAATTTTGTTTATGGT (SEQ ID NO: 1670) |
| 229 | HS3ST2 (SEQ ID NO: 113) | GAATCGGAGAGGCGAG (SEQ ID NO: 1671) |
| 230 | HS3ST2 (SEQ ID NO: 113) | AATTGGAGAGGTGAGG (SEQ ID NO: 1672) |
| 231 | HS3ST2 (SEQ ID NO: 113) | GGGTAATCGTTTGGTA (SEQ ID NO: 1673) |
| 232 | HS3ST2 (SEQ ID NO: 113) | GGGTAATTGTTTGGTAT (SEQ ID NO: 1674) |
| 233 | PRDM2 (SEQ ID NO: 114) | TGTAGAGACGACGATT (SEQ ID NO: 1675) |
| 234 | PRDM2 (SEQ ID NO: 114) | ATTGTAGAGATGATGATT (SEQ ID NO: 1676) |
| 235 | PRDM2 (SEQ ID NO: 114) | AGAGCGCGGTAGTAGT (SEQ ID NO: 1677) |
| 236 | PRDM2 (SEQ ID NO: 114) | TGAGAGTGTGGTAGTA (SEQ ID NO: 1678) |
| 237 | PRDM2 (SEQ ID NO: 114) | TGTTCGCGATGTTTTA (SEQ ID NO: 1679) |
| 238 | PRDM2 (SEQ ID NO: 114) | TGTTTGTGATGTTTTAGT (SEQ ID NO: 1680) |
| 239 | PRDM2 (SEQ ID NO: 114) | AGTATATAAACGTAGATTTT (SEQ ID NO: |
| | | 1681) |
| 240 | PRDM2 (SEQ ID NO: 114) | AAGTATATAAATGTAGATTTT (SEQ ID NO: |
| | | 1682) |
| 241 | ALX4 (SEQ ID NO: 64) | AAGTCGATCGTTTTGT (SEQ ID NO: 1683) |
| 242 | ALX4 (SEQ ID NO: 64) | TGGAAGTTGATTGTTTT (SEQ ID NO: 1684) |
| 243 | ALX4 (SEQ ID NO: 64) | TATTGCGAGGATTCGG (SEQ ID NO: 1685) |
| 244 | ALX4 (SEQ ID NO: 64) | ATTGTGAGGATTTGGT (SEQ ID NO: 1686) |
| 245 | ALX4 (SEQ ID NO: 64) | TTCGTAGCGTAGGGTT (SEQ ID NO: 1687) |
| 246 | ALX4 (SEQ ID NO: 64) | TTTGTAGTGTAGGGTTT (SEQ ID NO: 1688) |
| 247 | S100A7 (SEQ ID NO: 96) | TATAGTCGGGGTGATA (SEQ ID NO: 1689) |
| 248 | S100A7 (SEQ ID NO: 96) | TTTATAGTTGGGGTGAT (SEQ ID NO: 1690) |
| 249 | S100A7 (SEQ ID NO: 96) | AGTCGGGCGTTAGTAA (SEQ ID NO: 1691) |
| 250 | S100A7 (SEQ ID NO: 96) | GAGTTGGGTGTTAGTA (SEQ ID NO: 1692) |
| 251 | S100A7 (SEQ ID NO: 96) | GGATGGCGGAAGTTTA (SEQ ID NO: 1693) |
| 252 | S100A7 (SEQ ID NO: 96) | GGATGGTGGAAGTTTA (SEQ ID NO: 1694) |
| 253 | S100A7 (SEQ ID NO: 96) | GGATGGCGGAAGTTTA (SEQ ID NO: 1693) |
| 254 | S100A7 (SEQ ID NO: 96) | GGATGGTGGAAGTTTA (SEQ ID NO: 1694) |
| 255 | APC (SEQ ID NO: 65) | GATTCGTATTTCGTAGT (SEQ ID NO: 1695) |
| 256 | APC (SEQ ID NO: 65) | GATTCGTATTTCGTAGT (SEQ ID NO: 1695) |
| 257 | APC (SEQ ID NO: 65) | AGCGTTTTGGTTCGTAT (SEQ ID NO: 1696) |
| 258 | APC (SEQ ID NO: 65) | AGTGTTTTGGTTTGTAT (SEQ ID NO: 1697) |
| 259 | APC (SEQ ID NO: 65) | AGCGTTTTGGTTCGTAT (SEQ ID NO: 1696) |
| 260 | APC (SEQ ID NO: 65) | AGTGTTTTGGTTTGTAT (SEQ ID NO: 1697) |
| 261 | APC (SEQ ID NO: 65) | TTAATCGGCGGGTTTT (SEQ ID NO: 1698) |
| 262 | APC (SEQ ID NO: 65) | AGTTAATTGGTGGGTT (SEQ ID NO: 1699) |
| 263 | APC (SEQ ID NO: 65) | ATTTTCGAGTTCGGTA (SEQ ID NO: 1700) |
| 264 | APC (SEQ ID NO: 65) | TTTTTGAGTTTGGTAGT (SEQ ID NO: 1701) |
| 265 | BRCA2 (SEQ ID NO: 56) | ATTCGTTTTAGAGGCGTA (SEQ ID NO: 1702) |
| 266 | BRCA2 (SEQ ID NO: 56) | ATTTGTTTTAGAGGTGTA (SEQ ID NO: 1703) |
| 267 | BRCA2 (SEQ ID NO: 56) | ATTCGTTTTAGAGGCGTA (SEQ ID NO: 1702) |
| 268 | BRCA2 (SEQ ID NO: 56) | ATTTGTTTTAGAGGTGTA (SEQ ID NO: 1703) |
| 269 | SEQ ID NO: 2 (SEQ ID NO: 2) | TAGGTATACGAAAGAGTA (SEQ ID NO: 1704) |
| 270 | SEQ ID NO: 2 (SEQ ID NO: 2) | TTAGGTATATGAAAGAGTA (SEQ ID NO: 1705) |
| 271 | SEQ ID NO: 2 (SEQ ID NO: 2) | TTGATTGGCGGACGAG (SEQ ID NO: 1706) |
| 272 | SEQ ID NO: 2 (SEQ ID NO: 2) | TTGATTGGTGGATGAG (SEQ ID NO: 1707) |
| 273 | SEQ ID NO: 2 (SEQ ID NO: 2) | TTGATTGGCGGACGAG (SEQ ID NO: 1706) |
| 274 | SEQ ID NO: 2 (SEQ ID NO: 2) | TTGATTGGTGGATGAG (SEQ ID NO: 1707) |
| 275 | IGFBP7 (SEQ ID NO: 94) | TAGTCGCGGAATGTTA (SEQ ID NO: 1708) |
| 276 | IGFBP7 (SEQ ID NO: 94) | TTGGTAGTTGTGGAAT (SEQ ID NO: 1709) |
| 277 | IGFBP7 (SEQ ID NO: 94) | ATTTTTTCGCGGGTAT (SEQ ID NO: 1710) |
| 278 | IGFBP7 (SEQ ID NO: 94) | TTTTTGTGGGTATTTTAG (SEQ ID NO: 1711) |
| 279 | IGFBP7 (SEQ ID NO: 94) | GGTATATTCGACGGGG (SEQ ID NO: 1712) |
| 280 | IGFBP7 (SEQ ID NO: 94) | GGGTATATTTGATGGGG (SEQ ID NO: 1713) |
| 281 | IGFBP7 (SEQ ID NO: 94) | GGTACGAGCGTTTTTT (SEQ ID NO: 1714) |
| 282 | IGFBP7 (SEQ ID NO: 94) | TGGGTATGAGTGTTTT (SEQ ID NO: 1715) |
| 283 | IGFBP7 (SEQ ID NO: 94) | AAAGCGTATTTAATTCGT (SEQ ID NO: 1716) |
| 284 | IGFBP7 (SEQ ID NO: 94) | AGTGTATTTAATTTGTGTT (SEQ ID NO: 1717) |
| 285 | SOD2 (SEQ ID NO: 105) | GTCGTTTAGTCGGTTTA (SEQ ID NO: 1718) |
| 286 | SOD2 (SEQ ID NO: 105) | GTTGTTTAGTTGGTTTAT (SEQ ID NO: 1719) |
| 287 | SOD2 (SEQ ID NO: 105) | TATTAGGCGGTTGCGG (SEQ ID NO: 1720) |
| 288 | SOD2 (SEQ ID NO: 105) | TATTAGGTGGTTGTGG (SEQ ID NO: 1721) |
| 289 | SOD2 (SEQ ID NO: 105) | TATTAGGCGGTTGCGG (SEQ ID NO: 1720) |
| 290 | SOD2 (SEQ ID NO: 105) | TATTAGGTGGTTGTGG (SEQ ID NO: 1721) |
| 291 | SOD2 (SEQ ID NO: 105) | TACGGTTCGAAGGTTT (SEQ ID NO: 1722) |
| 292 | SOD2 (SEQ ID NO: 105) | AGTTGGTATGGTTTGA (SEQ ID NO: 1723) |
| 293 | NME1 (SEQ ID NO: 107) | AATTCGAGATTAGTTCGG (SEQ ID NO: 1724) |
| 294 | NME1 (SEQ ID NO: 107) | AATTTGAGATTAGTTTGG (SEQ ID NO: 1725) |
| 295 | NME1 (SEQ ID NO: 107) | AATTCGAGATTAGTTCGG (SEQ ID NO: 1724) |
| 296 | NME1 (SEQ ID NO: 107) | AATTTGAGATTAGTTTGG (SEQ ID NO: 1725) |
| 297 | TEBS1 (SEQ ID NO: 81) | TAAAGGGGCGTTCGTA (SEQ ID NO: 1726) |
| 298 | THBS1 (SEQ ID NO: 81) | AAGGGGTGTTTGTATT (SEQ ID NO: 1727) |
| 299 | THBS1 (SEQ ID NO: 81) | GGTTAGTTCGGGCGTA (SEQ ID NO: 1728) |
| 300 | THBS1 (SEQ ID NO: 81) | GGTTAGTTTGGGTGTA (SEQ ID NO: 1729) |
| 301 | THBS1 (SEQ ID NO: 81) | GGTTAGTTCGGGCGTA (SEQ ID NO: 1728) |
| 302 | THBS1 (SEQ ID NO: 81) | GGTTAGTTTGGGTGTA (SEQ ID NO: 1729) |
| 303 | THBS1 (SEQ ID NO: 81) | TTGTGCGTTCGGAGTA (SEQ ID NO: 1730) |
| 304 | THBS1 (SEQ ID NO: 81) | TGTGTTTGGAGTAGAG (SEQ ID NO: 1731) |
| 305 | ESR1 (SEQ ID NO: 75) | AAATCGGCGGGTTATT (SEQ ID NO: 1732) |
| 306 | ESR1 (SEQ ID NO: 75) | AGAAATTGGTGGGTTA (SEQ ID NO: 1733) |
| 307 | ESR1 (SEQ ID NO: 75) | AGTTGCGGACGGTTTA (SEQ ID NO: 1734) |
| 308 | ESR1 (SEQ ID NO: 75) | AGTTGTGGATGGTTTA (SEQ ID NO: 1735) |
| 309 | ESR1 (SEQ ID NO: 75) | AGTTGCGGACGGTTTA (SEQ ID NO: 1734) |
| 310 | ESR1 (SEQ ID NO: 75) | AGTTGTGGATGGTTTA (SEQ ID NO: 1735) |
| 311 | IL6 (SEQ ID NO: 99) | TTCGGTTATACGTAGG (SEQ ID NO: 1736) |
| 312 | IL6 (SEQ ID NO: 99) | TTTTGGTTATATGTAGGG (SEQ ID NO: 1737) |
| 313 | IL6 (SEQ ID NO: 99) | AGTTTAGTCGGTTTCGT (SEQ ID NO: 1738) |
| 314 | IL6 (SEQ ID NO: 99) | AGTTTAGTTGGTTTTGT (SEQ ID NO: 1739) |
| 315 | IL6 (SEQ ID NO: 99) | AGTTTAGTCGGTTTCGT (SEQ ID NO: 1738) |
| 316 | IL6 (SEQ ID NO: 99) | AGTTTAGTTGGTTTTGT (SEQ ID NO: 1739) |
| 317 | CASP8 (SEQ ID NO: 71) | TGTATTCGAGGCGGTA (SEQ ID NO: 1740) |
| 318 | CASP8 (SEQ ID NO: 71) | TTGTATTTGAGGTGGT (SEQ ID NO: 1741) |
| 319 | CASP8 (SEQ ID NO: 71) | ATTTTTTAAACGGGTTTA (SEQ ID NO: 1742) |
| 320 | CASP8 (SEQ ID NO: 71) | TTTTAAATGGGTTTATAGG (SEQ ID NO: 1743) |
| 321 | CASP8 (SEQ ID NO: 71) | ATCGTAGTTTTCGAGT (SEQ ID NO: 1744) |
| 322 | CASP8 (SEQ ID NO: 71) | ATTGTAGTTTTTGAGTTT (SEQ ID NO: 1745) |
| 323 | HOXA5 (SEQ ID NO: 78) | TTCGAGTTCGGTTGAA (SEQ ID NO: 1746) |
| 324 | HOXA5 (SEQ ID NO: 78) | GTTTGAGTTTGGTTGAA (SEQ ID NO: 1747) |
| 325 | HOXA5 (SEQ ID NO: 78) | TAGTTTTCGGTCGGAA (SEQ ID NO: 1748) |
| 326 | HOXA5 (SEQ ID NO: 78) | TAGTTTTTGGTTGGAAG (SEQ ID NO: 1749) |
| 327 | HOXA5 (SEQ ID NO: 78) | TAATTCGATTTCGGTTT (SEQ ID NO: 1750) |
| 328 | HOXA5 (SEQ ID NO: 78) | TTTAATTTGATTTTGGTTT (SEQ ID NO: 1751) |
| 329 | HOXA5 (SEQ ID NO: 78) | ATCGGTAGTTGACGGTT (SEQ ID NO: 1752) |
| 330 | HOXA5 (SEQ ID NO: 78) | ATTGGTAGTTGATGGTT (SEQ ID NO: 1753) |
| 331 | HOXA5 (SEQ ID NO: 78) | ATCGGTAGTTGACGGTT (SEQ ID NO: 1752) |
| 332 | HOXA5 (SEQ ID NO: 78) | ATTGGTAGTTGATGGTT (SEQ ID NO: 1753) |
| 333 | RARA (SEQ ID NO: 108) | TTCGGGATGTACGTTT (SEQ ID NO: 1754) |
| 334 | RARA (SEQ ID NO: 108) | TTTGGGATGTATGTTTT (SEQ ID NO: 1755) |
| 335 | RARA (SEQ ID NO: 108) | GAATTAGTATCGGTTTTT (SEQ ID NO: 1756) |
| 336 | RARA (SEQ ID NO: 108) | ATTAGTATTGGTTTTTGG (SEQ ID NO: 1757) |
| 337 | SNCG (SEQ ID NO: 73) | TGCGGTAGTATTCGAGT (SEQ ID NO: 1758) |
| 338 | SNCG (SEQ ID NO: 73) | TGTGGTAGTATTTGAGT (SEQ ID NO: 1759) |
| 339 | SNCG (SEQ ID NO: 73) | TGCGGTAGTATTCGAGT (SEQ ID NO: 1758) |
| 340 | SNCG (SEQ ID NO: 73) | TGTGGTAGTATTTGAGT (SEQ ID NO: 1759) |
| 341 | GPC3 (SEQ ID NO: 118) | AATAGTCGCGTTTAGG (SEQ ID NO: 1760) |
| 342 | GPC3 (SEQ ID NO: 118) | TAGTTGTGTTTAGGGAT (SEQ ID NO: 1761) |
| 343 | GPC3 (SEQ ID NO: 118) | TTTAACGTAGTTTTGATCGG (SEQ ID NO: |
| | | 1762) |
| 344 | GPC3 (SEQ ID NO: 118) | TTTAATGTAGTTTTGATTGG (SEQ ID NO: |
| | | 1763) |
| 345 | GPC3 (SEQ ID NO: 118) | TTTAACGTAGTTTTGATCGG (SEQ ID NO: |
| | | 1762) |
| 346 | GPC3 (SEQ ID NO: 118) | TTTAATGTAGTTTTGATTGG (SEQ ID NO: |
| | | 1763) |
| 347 | CLDN7 (SEQ ID NO: 87) | TTACGTTAAGTCGGGT (SEQ ID NO: 1764) |
| 348 | CLDN7 (SEQ ID NO: 87) | AGTTATGTTAAGTTGGG (SEQ ID NO: 1765) |
| 349 | CLDN7 (SEQ ID NO: 87) | TAGCGTTTTAGGCGTA (SEQ ID NO: 1766) |
| 350 | CLDN7 (SEQ ID NO: 87) | TAGTGTTTTAGGTGTATT (SEQ ID NO: 1767) |
| 351 | CLDN7 (SEQ ID NO: 87) | TTAGGGGCGTTTCGTA (SEQ ID NO: 1768) |
| 352 | CLDN7 (SEQ ID NO: 87) | TTAGGGGTGTTTTGTAG (SEQ ID NO: 1769) |
| 353 | CLDN7 (SEQ ID NO: 87) | TAGAATTCGGCGGGGA (SEQ ID NO: 1770) |
| 354 | CLDN7 (SEQ ID NO: 87) | TAGAATTTGGTGGGGA (SEQ ID NO: 1771) |
| 355 | CLDN7 (SEQ ID NO: 87) | TAGAATTCGGCGGGGA (SEQ ID NO: 1770) |
| 356 | CLDN7 (SEQ ID NO: 87) | TAGAATTTGGTGGGGA (SEQ ID NO: 1771) |
| 357 | SLIT2 (SEQ ID NO: 112) | TTCGATAGTTAACGATG (SEQ ID NO: 1772) |
| 358 | SLIT2 (SEQ ID NO: 112) | TTTGATAGTTAATGATGGT (SEQ ID NO: 1773) |
| 359 | SLIT2 (SEQ ID NO: 112) | ATTTCGTCGTAGTTTG (SEQ ID NO: 1774) |
| 360 | SLIT2 (SEQ ID NO: 112) | TTTTGTTGTAGTTTGGA (SEQ ID NO: 1775) |
| 361 | SLIT2 (SEQ ID NO: 112) | TAGCGGGTTCGTAGTA (SEQ ID NO: 1776) |
| 362 | SLIT2 (SEQ ID NO: 112) | TTAGTGGGTTTGTAGTA (SEQ ID NO: 1777) |
| 363 | SLIT2 (SEQ ID NO: 112) | AAGGCGCGGAAGTTTA (SEQ ID NO: 1778) |
| 364 | SLIT2 (SEQ ID NO: 112) | AAGGTGTGGAAGTTTA (SEQ ID NO: 1779) |
| 365 | SLIT2 (SEQ ID NO: 112) | AAGGCGCGGAAGTTTA (SEQ ID NO: 1778) |
| 366 | SLIT2 (SEQ ID NO: 112) | AAGGTGTGGAAGTTTA (SEQ ID NO: 1779) |
| 367 | IGSF4 (SEQ ID NO: 74) | AGGTAGATCGAGGAGG (SEQ ID NO: 1780) |
| 368 | IGSF4 (SEQ ID NO: 74) | AGGTAGATTGAGGAGG (SEQ ID NO: 1781) |
| 369 | IGSF4 (SEQ ID NO: 74) | AGGTAGATCGAGGAGG (SEQ ID NO: 1780) |
| 370 | IGSF4 (SEQ ID NO: 74) | AGGTAGATTGAGGAGG (SEQ ID NO: 1781) |
| 371 | IGSF4 (SEQ ID NO: 74) | TAGTCGTAGAGTCGGG (SEQ ID NO: 1782) |
| 372 | IGSF4 (SEQ ID NO: 74) | GTTGTAGAGTTGGGTT (SEQ ID NO: 1783) |
| 373 | IGSF4 (SEQ ID NO: 74) | TAGGTTTTCGGATTGA (SEQ ID NO: 1784) |
| 374 | IGSF4 (SEQ ID NO: 74) | GTAGGTTTTTGGATTGA (SEQ ID NO: 1785) |
| 375 | MCT1 (SEQ ID NO: 101) | ATTTTACGTAGGCGTT (SEQ ID NO: 1786) |
| 376 | MCT1 (SEQ ID NO: 101) | GATTTTATGTAGGTGTTT (SEQ ID NO: 1787) |
| 377 | MCT1 (SEQ ID NO: 101) | AGTTAGTCGCGTTTTA (SEQ ID NO: 1788) |
| 378 | MCT1 (SEQ ID NO: 101) | AGAGTTAGTTGTGTTTTA (SEQ ID NO: 1789) |
| 379 | MCT1 (SEQ ID NO: 101) | TATACGAGGAAGGTCGG (SEQ ID NO: 1790) |
| 380 | MCT1 (SEQ ID NO: 101) | TATATGAGGAAGGTTGG (SEQ ID NO: 1791) |
| 381 | MCT1 (SEQ ID NO: 101) | TATACGAGGAAGGTCGG (SEQ ID NO: 1790) |
| 382 | MCT1 (SEQ ID NO: 101) | TATATGAGGAAGGTTGG (SEQ ID NO: 1791) |
| 383 | SEQ ID NO: 6 (SEQ ID NO: 6) | AAGTTTATCGGCGTTT (SEQ ID NO: 1792) |
| 384 | SEQ ID NO: 6 (SEQ ID NO: 6) | AGAAGTTTATTGGTGTTT (SEQ ID NO: 1793) |
| 385 | SEQ ID NO: 6 (SEQ ID NO: 6) | ATTTCGGAATTTAAGCGT (SEQ ID NO: 1794) |
| 386 | SEQ ID NO: 6 (SEQ ID NO: 6) | TTTTGGAATTTAAGTGTT (SEQ ID NO: 1795) |
| 387 | SEQ ID NO: 6 (SEQ ID NO: 6) | TAATTTCGGACGCGGA (SEQ ID NO: 1796) |
| 388 | SEQ ID NO: 6 (SEQ ID NO: 6) | TTTTGGATGTGGAGGA (SEQ ID NO: 1797) |
| 389 | SEQ ID NO: 6 (SEQ ID NO: 6) | TTACGGTGAAGGCGGA (SEQ ID NO: 1798) |
| 390 | SEQ ID NO: 6 (SEQ ID NO: 6) | TTATGGTGAAGGTGGA (SEQ ID NO: 1799) |
| 391 | SEQ ID NO: 6 (SEQ ID NO: 6) | TTACGGTGAAGGCGGA (SEQ ID NO: 1798) |
| 392 | SEQ ID NO: 6 (SEQ ID NO: 6) | TTATGGTGAAGGTGGA (SEQ ID NO: 1799) |
| 393 | SEQ ID NO: 6 (SEQ ID NO: 6) | TTTCGGTTTTCGTTAAT (SEQ ID NO: 1800) |
| 394 | SEQ ID NO: 6 (SEQ ID NO: 6) | TTTGGTTTTTGTTAATTTAG (SEQ ID NO: |
| | | 1801) |
| 395 | SEQ ID NO: 6 (SEQ ID NO: 6) | TGTGCGAAGTTAACGT (SEQ ID NO: 1802) |
| 396 | SEQ ID NO: 6 (SEQ ID NO: 6) | TTGTGTGAAGTTAATGT (SEQ ID NO: 1803) |
| 397 | SEQ ID NO: 8 (SEQ ID NO: 8) | ATAAAGCGGGGTTTTA (SEQ ID NO: 1804) |
| 398 | SEQ ID NO: 8 (SEQ ID NO: 8) | GGATAAAGTGGGGTTT (SEQ ID NO: 1805) |
| 399 | SEQ ID NO: 8 (SEQ ID NO: 8) | AGGAGGCGAGAAATTT (SEQ ID NO: 1806) |
| 400 | SEQ ID NO: 8 (SEQ ID NO: 8) | GAGGAGGTGAGAAATT (SEQ ID NO: 1807) |
| 401 | SEQ ID NO: 8 (SEQ ID NO: 8) | AGAAATTTCGGGGTAG (SEQ ID NO: 1808) |
| 402 | SEQ ID NO: 8 (SEQ ID NO: 8) | GAAATTTTGGGGTAGTA (SEQ ID NO: 1809) |
| 403 | SEQ ID NO: 8 (SEQ ID NO: 8) | GGTAGTATCGTTTATAGA (SEQ ID NO: 1810) |
| 404 | SEQ ID NO: 8 (SEQ ID NO: 8) | GGGGTAGTATTGTTTATA (SEQ ID NO: 1811) |
| 405 | PROSTAGLANDIN E2 RECEPTOR, EP4 | AGTGTATCGTTTTTCGG (SEQ ID NO: 1812) |
| | SUBTYPE (PROSTANOID EP4 RECEPTOR) | |
| | (PGE RECEPTOR, EP4 SUBTYPE) (SEQ | |
| | ID NO: 10) | |
| 406 | PROSTAGLANDIN E2 RECEPTOR, EP4 | TAGTGTATTGTTTTTTGG (SEQ ID NO: 1813) |
| | SUBTYPE (PROSTANOID EP4 RECEPTOR) | |
| | (PGE RECEPTOR, EP4 SUBTYPE) (SEQ | |
| | ID NO: 10) | |
| 407 | PROSTAGLANDIN E2 RECEPTOR, EP4 | TGCGTATCGTTAGTTA (SEQ ID NO: 1814) |
| | SUBTYPE (PROSTANOID EP4 RECEPTOR) | |
| | (PGE RECEPTOR, EP4 SUBTYPE) (SEQ | |
| | ID NO: 10) | |
| 408 | PROSTAGLANDIN E2 RECEPTOR, EP4 | AGGTTGTGTATTGTTAG (SEQ ID NO: 1815) |
| | SUBTYPE (PROSTANOID EP4 RECEPTOR) | |
| | (PGE RECEPTOR, EP4 SUBTYPE) (SEQ | |
| | ID NO: 10) | |
| 409 | PROSTAGLANDIN E2 RECEPTOR, EP4 | ATTATTTCGGCGGTGA (SEQ ID NO: 1816) |
| | SUBTYPE (PROSTANOID EP4 RECEPTOR) | |
| | (PGE RECEPTOR, EP4 SUBTYPE) (SEQ | |
| | ID NO: 10) | |
| 410 | PROSTAGLANDIN E2 RECEPTOR, EP4 | GATTATTTTGGTGGTGA (SEQ ID NO: 1817) |
| | SUBTYPE (PROSTANOID EP4 RECEPTOR) | |
| | (PGE RECEPTOR, EP4 SUBTYPE) (SEQ | |
| | ID NO: 10) | |
| 411 | PROSTAGLANDIN E2 RECEPTOR, EP4 | TAAGTCGCGTAAGGAG (SEQ ID NO: 1818) |
| | SUBTYPE (PROSTANOID EP4 RECEPTOR) | |
| | (PGE RECEPTOR, EP4 SUBTYPE) (SEQ | |
| | ID NO: 10) | |
| 412 | PROSTAGLANDIN E2 RECEPTOR, EP4 | AAGTTGTGTAAGGAGTA (SEQ ID NO: 1819) |
| | SUBTYPE (PROSTANOID EP4 RECEPTOR) | |
| | (PGE RECEPTOR, EP4 SUBTYPE) (SEQ | |
| | ID NO: 10) | |
| 413 | PROSTAGLANDIN E2 RECEPTOR, EP4 | GTATCGCGAGTTTGGA (SEQ ID NO: 1820) |
| | SUBTYPE (PROSTANOID EP4 RECEPTOR) | |
| | (PGE RECEPTOR, EP4 SUBTYPE) (SEQ | |
| | ID NO: 10) | |
| 414 | PROSTAGLANDIN E2 RECEPTOR, EP4 | GTATTGTGAGTTTGGAG (SEQ ID NO: 1821) |
| | SUBTYPE (PROSTANOID EP4 RECEPTOR) | |
| | (PGE RECEPTOR, EP4 SUBTYPE) (SEQ | |
| | ID NO: 10) | |
| 415 | SEQ ID NO: 51 (SEQ ID NO: 51) | GTCGGGGTCGATTCGA (SEQ ID NO: 1822) |
| 416 | SEQ ID NO: 51 (SEQ ID NO: 51) | GTTGGGGTTGATTTGAT (SEQ ID NO: 1823) |
| 417 | SEQ ID NO: 51 (SEQ ID NO: 51) | AGGATTCGTTTGCGTT (SEQ ID NO: 1824) |
| 418 | SEQ ID NO: 51 (SEQ ID NO: 51) | AAGGATTTGTTTGTGTT (SEQ ID NO: 1825) |
| 419 | MGC34831 (SEQ ID NO: 52) | ATTAGCGTTTGGCGTT (SEQ ID NO: 1826) |
| 420 | MGC34831 (SEQ ID NO: 52) | AATTAGTGTTTGGTGTT (SEQ ID NO: 1827) |
| 421 | MGC34831 (SEQ ID NO: 52) | GTTTAGCGACGGTCGT (SEQ ID NO: 1828) |
| 422 | MGC34831 (SEQ ID NO: 52) | TGTTTAGTGATGGTTGT (SEQ ID NO: 1829) |
| 423 | SEQ ID NO: 54 (SEQ ID NO: 54) | TGTGTAGCGGCGATTA (SEQ ID NO: 1830) |
| 424 | SEQ ID NO: 54 (SEQ ID NO: 54) | GTGTGTAGTGGTGATT (SEQ ID NO: 1831) |
| 425 | SEQ ID NO: 54 (SEQ ID NO: 54) | ATTAGCGTTTGGTCGG (SEQ ID NO: 1832) |
| 426 | SEQ ID NO: 54 (SEQ ID NO: 54) | ATTAGTGTTTGGTTGGG (SEQ ID NO: 1833) |
| 427 | PDLIM1 (SEQ ID NO: 55) | TAGGTCGCGTAGTCGT (SEQ ID NO: 1834) |
| 428 | PDLIM1 (SEQ ID NO: 55) | TTAGGTTGTGTAGTTGT (SEQ ID NO: 1835) |
| 429 | SEQ ID NO: 15 (SEQ ID NO: 15) | AATCGTGCGGTTGATA (SEQ ID NO: 1836) |
| 430 | SEQ ID NO: 15 (SEQ ID NO: 15) | TGTAGAATTGTGTGGT (SEQ ID NO: 1837) |
| 431 | SEQ ID NO: 15 (SEQ ID NO: 15) | TTGCGTAGAAAATTCGAG (SEQ ID NO: 1838) |
| 432 | SEQ ID NO: 15 (SEQ ID NO: 15) | TTGTGTAGAAAATTTGAG (SEQ ID NO: 1839) |
| 433 | SEQ ID NO: 15 (SEQ ID NO: 15) | TTGCGTAGAAAATTCGAG (SEQ ID NO: 1838) |
| 434 | SEQ ID NO: 15 (SEQ ID NO: 15) | TTGTGTAGAAAATTTGAG (SEQ ID NO: 1839) |
| 435 | SEQ ID NO: 15 (SEQ ID NO: 15) | AAAATTCGAGGTCGGG (SEQ ID NO: 1840) |
| 436 | SEQ ID NO: 15 (SEQ ID NO: 15) | AAAATTTGAGGTTGGG (SEQ ID NO: 1841) |
| 437 | SEQ ID NO: 15 (SEQ ID NO: 15) | AAAATTCGAGGTCGGG (SEQ ID NO: 1840) |
| 438 | SEQ ID NO: 15 (SEQ ID NO: 15) | AAAATTTGAGGTTGGG (SEQ ID NO: 1841) |
| 439 | DKK3 (SEQ ID NO: 24) | ATTCGTTTTAGTTCGAG (SEQ ID NO: 1842) |
| 440 | DKK3 (SEQ ID NO: 24) | ATTTGTTTTAGTTTGAGT (SEQ ID NO: 1843) |
| 441 | DKK3 (SEQ ID NO: 24) | TTCGATCGTTTTAGGA (SEQ ID NO: 1844) |
| 442 | DKK3 (SEQ ID NO: 24) | AGTTTTGATTGTTTTAGG (SEQ ID NO: 1845) |
| 443 | DKK3 (SEQ ID NO: 24) | ATTCGTTCGGAGACGG (SEQ ID NO: 1846) |
| 444 | DKK3 (SEQ ID NO: 24) | TTTGTTTGGAGATGGG (SEQ ID NO: 1847) |
| 445 | DKK3 (SEQ ID NO: 24) | GAAAAGACGCGATTTT (SEQ ID NO: 1848) |
| 446 | DKK3 (SEQ ID NO: 24) | GAAAAGATGTGATTTTATT (SEQ ID NO: 1849) |
| 447 | SEQ ID NO: 28 (SEQ ID NO: 28) | TATCGACGTTTTTGGT (SEQ ID NO: 1850) |
| 448 | SEQ ID NO: 28 (SEQ ID NO: 28) | TATTGATGTTTTTGGTTT (SEQ ID NO: 1851) |
| 449 | SEQ ID NO: 29 (SEQ ID NO: 29) | TTGATGCGGAGTTCGA (SEQ ID NO: 1852) |
| 450 | SEQ ID NO: 29 (SEQ ID NO: 29) | TTGATGTGGAGTTTGA (SEQ ID NO: 1853) |
| 451 | SEQ ID NO: 29 (SEQ ID NO: 29) | TTGATGCGGAGTTCGA (SEQ ID NO: 1852) |
| 452 | SEQ ID NO: 29 (SEQ ID NO: 29) | TTGATGTGGAGTTTGA (SEQ ID NO: 1853) |
| 453 | SEQ ID NO: 29 (SEQ ID NO: 29) | TAGGAACGGTAGGCGG (SEQ ID NO: 1854) |
| 454 | SEQ ID NO: 29 (SEQ ID NO: 29) | TAGGAATGGTAGGTGG (SEQ ID NO: 1855) |
| 455 | SEQ ID NO: 29 (SEQ ID NO: 29) | TAGGAACGGTAGGCGG (SEQ ID NO: 1854) |
| 456 | SEQ ID NO: 29 (SEQ ID NO: 29) | TAGGAATGGTAGGTGG (SEQ ID NO: 1855) |
| 457 | SEQ ID NO: 29 (SEQ ID NO: 29) | GTCGGAGGCGTTTGAG (SEQ ID NO: 1856) |
| 458 | SEQ ID NO: 29 (SEQ ID NO: 29) | GTTGGAGGTGTTTGAGA (SEQ ID NO: 1857) |
| 459 | ARL7 (SEQ ID NO: 30) | TAGATTTCGTAGTTTTTTA (SEQ ID NO: 1858) |
| 460 | ARL7 (SEQ ID NO: 30) | TAGATTTTGTAGTTTTTTAA (SEQ ID NO: |
| | | 1859) |
| 461 | ARL7 (SEQ ID NO: 30) | TGGGTACGTTTACGGT (SEQ ID NO: 1860) |
| 462 | ARL7 (SEQ ID NO: 30) | TGGGTATGTTTATGGTT (SEQ ID NO: 1861) |
| 463 | ARL7 (SEQ ID NO: 30) | GAAGAAATCGTTTTTGT (SEQ ID NO: 1862) |
| 464 | ARL7 (SEQ ID NO: 30) | GAAGAAATTGTTTTTGTT (SEQ ID NO: 1863) |
| 465 | ARL7 (SEQ ID NO: 30) | TAGTAGGATCGGTTTTT (SEQ ID NO: 1864) |
| 466 | ARL7 (SEQ ID NO: 30) | ATAGTAGGATTGGTTTTT (SEQ ID NO: 1865) |
| 467 | SEQ ID NO: 31 (SEQ ID NO: 31) | AACGTTGCGTTGGGTA (SEQ ID NO: 1866) |
| 468 | SEQ ID NO: 31 (SEQ ID NO: 31) | AATGTTGTGTTGGGTAA (SEQ ID NO: 1867) |
| 469 | SEQ ID NO: 31 (SEQ ID NO: 31) | TAGCGTTTCGTGGTTA (SEQ ID NO: 1868) |
| 470 | SEQ ID NO: 31 (SEQ ID NO: 31) | GTAGTGTTTTGTGGTTA (SEQ ID NO: 1869) |
| 471 | THH (SEQ ID NO: 32) | TTCGGAAGAAAAGCGAAT (SEQ ID NO: 1870) |
| 472 | THH (SEQ ID NO: 32) | TTTGGAAGAAAAGTGAAT (SEQ ID NO: 1871) |
| 473 | THH (SEQ ID NO: 32) | TTCGGAAGAAAAGCGAAT (SEQ ID NO: 1870) |
| 474 | THH (SEQ ID NO: 32) | TTTGGAAGAAAAGTGAAT (SEQ ID NO: 1871) |
| 475 | THH (SEQ ID NO: 32) | GTTCGTTGGCGTAAAT (SEQ ID NO: 1872) |
| 476 | THH (SEQ ID NO: 32) | GGTTTGTTGGTGTAAAT (SEQ ID NO: 1873) |
| 477 | THH (SEQ ID NO: 32) | TATTCGGAAGTGATCGG (SEQ ID NO: 1874) |
| 478 | THH (SEQ ID NO: 32) | TATTTGGAAGTGATTGG (SEQ ID NO: 1875) |
| 479 | THH (SEQ ID NO: 32) | TATTCGGAAGTGATCGG (SEQ ID NO: 1874) |
| 480 | THH (SEQ ID NO: 32) | TATTTGGAAGTGATTGG (SEQ ID NO: 1875) |
| 481 | SENP3 (SEQ ID NO: 39) | TATTCGGATCGGGTTT (SEQ ID NO: 1876) |
| 482 | SENP3 (SEQ ID NO: 39) | TTTATTTGGATTGGGTT (SEQ ID NO: 1877) |
| 483 | SENP3 (SEQ ID NO: 39) | TAGTCGAAAGTAGGACGT (SEQ ID NO: 1878) |
| 484 | SENP3 (SEQ ID NO: 39) | TAGTTGAAAGTAGGATGT (SEQ ID NO: 1879) |
| 485 | SENP3 (SEQ ID NO: 39) | TAGTCGAAAGTAGGACGT (SEQ ID NO: 1878) |
| 486 | SENP3 (SEQ ID NO: 39) | TAGTTGAAAGTAGGATGT (SEQ ID NO: 1879) |
| 487 | SENP3 (SEQ ID NO: 39) | AGGACGTTTTTGATCGG (SEQ ID NO: 1880) |
| 488 | SENP3 (SEQ ID NO: 39) | AGGATGTTTTTGATTGG (SEQ ID NO: 1881) |
| 489 | SENP3 (SEQ ID NO: 39) | AGGACGTTTTTGATCGG (SEQ ID NO: 1880) |
| 490 | SENP3 (SEQ ID NO: 39) | AGGATGTTTTTGATTGG (SEQ ID NO: 1881) |
| 491 | SENP3 (SEQ ID NO: 39) | AGTTATCGTTAGGAGGG (SEQ ID NO: 1882) |
| 492 | SENP3 (SEQ ID NO: 39) | AGTTATTGTTAGGAGGG (SEQ ID NO: 1883) |
| 493 | SENP3 (SEQ ID NO: 39) | AGTTATCGTTAGGAGGG (SEQ ID NO: 1882) |
| 494 | SENP3 (SEQ ID NO: 39) | AGTTATTGTTAGGAGGG (SEQ ID NO: 1883) |
| 495 | SEQ ID NO: 42 (SEQ ID NO: 42) | GAGTCGGGTTGCGATG (SEQ ID NO: 1884) |
| 496 | SEQ ID NO: 42 (SEQ ID NO: 42) | GGAGTTGGGTTGTGAT (SEQ ID NO: 1885) |
| 497 | SEQ ID NO: 42 (SEQ ID NO: 42) | ATGGGTTGGGATTTTTA (SEQ ID NO: 1886) |
| 498 | SEQ ID NO: 42 (SEQ ID NO: 42) | ATGGGTTGTGATTTTTA (SEQ ID NO: 1887) |
| 499 | SEQ ID NO: 42 (SEQ ID NO: 42) | ATGGGTTGCGATTTTTA (SEQ ID NO: 1886) |
| 500 | SEQ ID NO: 42 (SEQ ID NO: 42) | ATGGGTTGTGATTTTTA (SEQ ID NO: 1887) |
| 501 | (SEQ ID NO: 117) | TAGCGGTTTTTTAGCGTA (SEQ ID NO: 1888) |
| 502 | (SEQ ID NO: 117) | AGTGGTTTTTTAGTGTAT (SEQ ID NO: 1889) |
| 503 | (SEQ ID NO: 117) | AGATGCGCGGGTAGAT (SEQ ID NO: 1890) |
| 504 | (SEQ ID NO: 117) | AGATGTGTGGGTAGAT (SEQ ID NO: 1891) |
| 505 | (SEQ ID NO: 117) | AGATGCGCGGGTAGAT (SEQ ID NO: 1890) |
| 506 | (SEQ ID NO: 117) | AGATGTGTGGGTAGAT (SEQ ID NO: 1891) |
| 507 | (SEQ ID NO: 117) | AGATAGTTCGTATTCGT (SEQ ID NO: 1892) |
| 508 | (SEQ ID NO: 117) | GTAGATAGTTTGTATTTGT (SEQ ID NO: 1893) |
| 509 | (SEQ ID NO: 117) | TTTGTTCGTAACGTTT (SEQ ID NO: 1894) |
| 510 | (SEQ ID NO: 117) | TGTTTGTAATGTTTAGAG (SEQ ID NO: 1895) |
| 511 | O60279 (SEQ ID NO: 47) | AGTAAACGAATAAGAAGT (SEQ ID NO: 1896) |
| 512 | O60279 (SEQ ID NO: 47) | AAGTAAATGAATAAGAAGT (SEQ ID NO: 1897) |
| 513 | O60279 (SEQ ID NO: 47) | TACGTTTTTTCGGATTA (SEQ ID NO: 1898) |
| 514 | O60279 (SEQ ID NO: 47) | TATGTTTTTTTGGATTAAG (SEQ ID NO: 1899) |
| 515 | O60279 (SEQ ID NO: 47) | TAATTATCGGCGGTGT (SEQ ID NO: 1900) |
| 516 | O60279 (SEQ ID NO: 47) | ATTATTGGTGGTGTTTT (SEQ ID NO: 1901) |
| 517 | O60279 (SEQ ID NO: 47) | GGACGGCGGAAAATTA (SEQ ID NO: 1902) |
| 518 | O60279 (SEQ ID NO: 47) | AGGGATGGTGGAAAAT (SEQ ID NO: 1903) |
| 519 | SEQ ID NO: 48 (SEQ ID NO: 48) | TATTTGGCGATTCGGA (SEQ ID NO: 1904) |
| 520 | SEQ ID NO: 48 (SEQ ID NO: 48) | TGGTGATTTGGAGATT (SEQ ID NO: 1905) |
| 521 | SEQ ID NO: 48 (SEQ ID NO: 48) | TAGGGTTACGTGTCGG (SEQ ID NO: 1906) |
| 522 | SEQ ID NO: 48 (SEQ ID NO: 48) | TAGGGTTATGTGTTGG (SEQ ID NO: 1907) |
| 523 | SEQ ID NO: 48 (SEQ ID NO: 48) | TAGGGTTACGTGTCGG (SEQ ID NO: 1906) |
| 524 | SEQ ID NO: 48 (SEQ ID NO: 48) | TAGGGTTATGTGTTGG (SEQ ID NO: 1907) |
| 525 | SEQ ID NO: 48 (SEQ ID NO: 48) | AACGAATTTTTCGATATT (SEQ ID NO: 1908) |
| 526 | SEQ ID NO: 48 (SEQ ID NO: 48) | TTTAATGAATTTTTTGATATT (SEQ ID NO: |
| | | 1909) |
| 527 | SEQ ID NO: 48 (SEQ ID NO: 48) | AAAATCGTATGCGTGT (SEQ ID NO: 1910) |
| 528 | SEQ ID NO: 48 (SEQ ID NO: 48) | GAAAATTGTATGTGTGTG (SEQ ID NO: 1911) |
| 529 | SEQ ID NO: 9 (SEQ ID NO: 9) | GTTTCGCGTTTAGGGA (SEQ ID NO: 1912) |
| 530 | SEQ ID NO: 9 (SEQ ID NO: 9) | GTTTTGTGTTTAGGGAT (SEQ ID NO: 1913) |
| 531 | SEQ ID NO: 9 (SEQ ID NO: 9) | AGTGTTCGTCGTAGTT (SEQ ID NO: 1914) |
| 532 | SEQ ID NO: 9 (SEQ ID NO: 9) | TGAGTGTTTGTTGTAGT (SEQ ID NO: 1915) |
| 533 | SEQ ID NO: 4 (SEQ ID NO: 4) | TTTTGTTCGCGTTGAA (SEQ ID NO: 1916) |
| 534 | SEQ ID NO: 4 (SEQ ID NO: 4) | TTGTTTGTGTTGAAGTA (SEQ ID NO: 1917) |
| 535 | SEQ ID NO: 4 (SEQ ID NO: 4) | GGGTCGCGAGGTAGTT (SEQ ID NO: 1918) |
| 536 | SEQ ID NO: 4 (SEQ ID NO: 4) | TGGGTTGTGAGGTAGT (SEQ ID NO: 1919) |
| 537 | SEQ ID NO: 4 (SEQ ID NO: 4) | TTTGTGCGACGTTATT (SEQ ID NO: 1920) |
| 538 | SEQ ID NO: 4 (SEQ ID NO: 4) | GGTTTGTGTGATGTTAT (SEQ ID NO: 1921) |
| 539 | SEQ ID NO: 4 (SEQ ID NO: 4) | ATGGCGGTTTCGATTT (SEQ ID NO: 1922) |
| 540 | SEQ ID NO: 4 (SEQ ID NO: 4) | GATGGTGGTTTTGATTT (SEQ ID NO: 1923) |
| 541 | SEQ ID NO: 5 (SEQ ID NO: 5) | AATGAGCGAGAAAGTA (SEQ ID NO: 1924) |
| 542 | SEQ ID NO: 5 (SEQ ID NO: 5) | AGAATGAGTGAGAAAGT (SEQ ID NO: 1925) |
| 543 | SEQ ID NO: 5 (SEQ ID NO: 5) | ATTAAACGGGATGGTT (SEQ ID NO: 1926) |
| 544 | SEQ ID NO: 5 (SEQ ID NO: 5) | AATATTAAATGGGATGGT (SEQ ID NO: 1927) |
| 545 | SEQ ID NO: 5 (SEQ ID NO: 5) | GAGTTGCGAGGATTTT (SEQ ID NO: 1928) |
| 546 | SEQ ID NO: 5 (SEQ ID NO: 5) | GGAGTTGTGAGGATTT (SEQ ID NO: 1929) |
| 547 | SEQ ID NO: 5 (SEQ ID NO: 5) | GGGAATCGTTGATTTT (SEQ ID NO: 1930) |
| 548 | SEQ ID NO: 5 (SEQ ID NO: 5) | AGGGGAATTGTTGATT (SEQ ID NO: 1931) |
| 549 | SEQ ID NO: 7 (SEQ ID NO: 7) | TAGTCGTCGTGTAGGA (SEQ ID NO: 1932) |
| 550 | SEQ ID NO: 7 (SEQ ID NO: 7) | TAGGTAGTTGTTGTGTA (SEQ ID NO: 1933) |
| 551 | SEQ ID NO: 7 (SEQ ID NO: 7) | TATAGGTACGCGATGA (SEQ ID NO: 1934) |
| 552 | SEQ ID NO: 7 (SEQ ID NO: 7) | AGGTATGTGATGAGGA (SEQ ID NO: 1935) |
| 553 | SEQ ID NO: 7 (SEQ ID NO: 7) | TATGGTTACGTACGAG (SEQ ID NO: 1936) |
| 554 | SEQ ID NO: 7 (SEQ ID NO: 7) | ATGGTTATGTATGAGTTT (SEQ ID NO: 1937) |
| 555 | SEQ ID NO: 7 (SEQ ID NO: 7) | ATGATTTGCGTTACGT (SEQ ID NO: 1938) |
| 556 | SEQ ID NO: 7 (SEQ ID NO: 7) | ATGATTTGTGTTATGTTT (SEQ ID NO: 1939) |
| 557 | SEQ ID NO: 7 (SEQ ID NO: 7) | TAACGTTGTGGTTCGAA (SEQ ID NO: 1940) |
| 558 | SEQ ID NO: 7 (SEQ ID NO: 7) | TAATGTTGTGGTTTGAA (SEQ ID NO: 1941) |
| 559 | SEQ ID NO: 7 (SEQ ID NO: 7) | TAACGTTGTGGTTCGAA (SEQ ID NO: 1940) |
| 560 | SEQ ID NO: 7 (SEQ ID NO: 7) | TAATGTTGTGGTTTGAA (SEQ ID NO: 1941) |
| 561 | SEQ ID NO: 1 (SEQ ID NO: 1) | GGTCGGCGTTGATTTTA (SEQ ID NO: 1942) |
| 562 | SEQ ID NO: 1 (SEQ ID NO: 1) | GGTTGGTGTTGATTTTA (SEQ ID NO: 1943) |
| 563 | SEQ ID NO: 1 (SEQ ID NO: 1) | GGTCGGCGTTGATTTTA (SEQ ID NO: 1942) |
| 564 | SEQ ID NO: 1 (SEQ ID NO: 1) | GGTTGGTGTTGATTTTA (SEQ ID NO: 1943) |
| 565 | SEQ ID NO: 1 (SEQ ID NO: 1) | GATTCGAACGGATTTT (SEQ ID NO: 1944) |
| 566 | SEQ ID NO: 1 (SEQ ID NO: 1) | GGGATTTGAATGGATTT (SEQ ID NO: 1945) |
| 567 | SEQ ID NO: 1 (SEQ ID NO: 1) | TGGGTCGGGATTCGAA (SEQ ID NO: 1946) |
| 568 | SEQ ID NO: 1 (SEQ ID NO: 1) | TGGGTTGGGATTTGAA (SEQ ID NO: 1947) |
| 569 | SEQ ID NO: 1 (SEQ ID NO: 1) | TGGGTCGGGATTCGAA (SEQ ID NO: 1946) |
| 570 | SEQ ID NO: 1 (SEQ ID NO: 1) | TGGGTTGGGATTTGAA (SEQ ID NO: 1947) |
| 571 | SEQ ID NO: 1 (SEQ ID NO: 1) | GTCGGAAGTTTCGGGA (SEQ ID NO: 1948) |
| 572 | SEQ ID NO: 1 (SEQ ID NO: 1) | GTTGGAAGTTTTGGGAT (SEQ ID NO: 1949) |
| 573 | SEQ ID NO: 1 (SEQ ID NO: 1) | TGGATATCGTAGGGTA (SEQ ID NO: 1950) |
| 574 | SEQ ID NO: 1 (SEQ ID NO: 1) | TGGATATTGTAGGGTAG (SEQ ID NO: 1951) |
| 575 | PROSTAGLANDIN E2 RECEPTOR, EP4 | AGGTAATCGAGGCGGT (SEQ ID NO: 1952) |
| | SUBTYPE (PROSTANOID EP4 RECEPTOR) | |
| | (PGE RECEPTOR, EP4 SUBTYPE) (SEQ | |
| | ID NO: 10) | |
| 576 | PROSTAGLANDIN E2 RECEPTOR, EP4 | AGGTAATTGAGGTGGT (SEQ ID NO: 1953) |
| | SUBTYPE (PROSTANOID EP4 RECEPTOR) | |
| | (PGE RECEPTOR, EP4 SUBTYPE) (SEQ | |
| | ID NO: 10) | |
| 577 | PROSTAGLANDIN E2 RECEPTOR, EP4 | AGGTAATCGAGGCGGT (SEQ ID NO: 1952) |
| | SUBTYPE (PROSTANOID EP4 RECEPTOR) | |
| | (PGE RECEPTOR, EP4 SUBTYPE) (SEQ | |
| | ID NO: 10) | |
| 578 | PROSTAGLANDIN E2 RECEPTOR, EP4 | AGGTAATTGAGGTGGT (SEQ ID NO: 1953) |
| | SUBTYPE (PROSTANOID EP4 RECEPTOR) | |
| | (PGE RECEPTOR, EP4 SUBTYPE) (SEQ | |
| | ID NO: 10) | |
| 579 | PROSTAGLANDIN E2 RECEPTOR, EP4 | GGCGTCGAAAGTCGTT (SEQ ID NO: 1954) |
| | SUBTYPE (PROSTANOID EP4 RECEPTOR) | |
| | (PGE RECEPTOR, EP4 SUBTYPE) (SEQ | |
| | ID NO: 10) | |
| 580 | PROSTAGLANDIN E2 RECEPTOR, EP4 | GGTGTTGAAAGTTGTTG (SEQ ID NO: 1955) |
| | SUBTYPE (PROSTANOID EP4 RECEPTOR) | |
| | (PGE RECEPTOR, EP4 SUBTYPE) (SEQ | |
| | ID NO: 10) | |
| 581 | PROSTAGLANDIN E2 RECEPTOR, EP4 | TAATCGTTTGTTTACGT (SEQ ID NO: 1956) |
| | SUBTYPE (PROSTANOID EP4 RECEPTOR) | |
| | (PGE RECEPTOR, EP4 SUBTYPE) (SEQ | |
| | ID NO: 10) | |
| 582 | PROSTAGLANDIN E2 RECEPTOR, EP4 | AATTGTTTGTTTATGTAGT (SEQ ID NO: 1957) |
| | SUBTYPE (PROSTANOID EP4 RECEPTOR) | |
| | (PGE RECEPTOR, EP4 SUBTYPE) (SEQ | |
| | ID NO: 10) | |
| 583 | ORPHAN NUCLEAR RECEPTOR NR5A2 | TTACGGAGGCGTTTTA (SEQ ID NO: 1958) |
| | (ALPHA-1-FETOPROTEIN | |
| | TRANSCRIPTION FACTOR) | |
| | (HEPATOCYTIC TRANSCRIPTION | |
| | FACTOR) (B1-BINDING FACTOR) | |
| | (HB1F) (CYP7A PROMOTER BINDING | |
| | FACTOR) (SEQ ID NO: 11) | |
| 584 | ORPHAN NUCLEAR RECEPTOR NR5A2 | TTTTATGGAGGTGTTTT (SEQ ID NO: 1959) |
| | (ALPHA-1-FETOPROTEIN | |
| | TRANSCRIPTION FACTOR) | |
| | (HEPATOCYTIC TRANSCRIPTION | |
| | FACTOR) (B1-BINDING FACTOR) | |
| | (HB1F) (CYP7A PROMOTER BINDING | |
| | FACTOR) (SEQ ID NO: 11) | |
| 585 | ORPHAN NUCLEAR RECEPTOR NR5A2 | AGGCGAATTTATCGGG (SEQ ID NO: 1960) |
| | (ALPHA-1-FETOPROTEIN | |
| | TRANSCRIPTION FACTOR) | |
| | (HEPATOCYTIC TRANSCRIPTION | |
| | FACTOR) (B1-BINDING FACTOR) | |
| | (HB1F) (CYP7A PROMOTER BINDING | |
| | FACTOR) (SEQ ID NO: 11) | |
| 586 | ORPHAN NUCLEAR RECEPTOR NR5A2 | GGTGAATTTATTGGGG (SEQ ID NO: 1961) |
| | (ALPHA-1-FETOPROTEIN | |
| | TRANSCRIPTION FACTOR) | |
| | (HEPATOCYTIC TRANSCRIPTION | |
| | FACTOR) (B1-BINDING FACTOR) | |
| | (HB1F) (CYP7A PROMOTER BINDING | |
| | FACTOR) (SEQ ID NO: 11) | |
| 587 | ORPHAN NUCLEAR RECEPTOR NR5A2 | TAGTCGAAGTAGGCGT (SEQ ID NO: 1962) |
| | (ALPHA-1-FETOPROTEIN | |
| | TRANSCRIPTION FACTOR) | |
| | (HEPATOCYTIC TRANSCRIPTION | |
| | FACTOR) (B1-BINDING FACTOR) | |
| | (HB1F) (CYP7A PROMOTER BINDING | |
| | FACTOR) (SEQ ID NO: 11) | |
| 588 | ORPHAN NUCLEAR RECEPTOR NR5A2 | TAGTTGAAGTAGGTGTT (SEQ ID NO: 1963) |
| | (ALPHA-1-FETOPROTEIN | |
| | TRANSCRIPTION FACTOR) | |
| | (HEPATOCYTIC TRANSCRIPTION | |
| | FACTOR) (B1-BINDING FACTOR) | |
| | (HB1F) (CYP7A PROMOTER BINDING | |
| | FACTOR) (SEQ ID NO: 11) | |
| 589 | ORPHAN NUCLEAR RECEPTOR NR5A2 | TTTTCGACGAAGTTTT (SEQ ID NO: 1964) |
| | (ALPHA-1-FETOPROTEIN | |
| | TRANSCRIPTION FACTOR) | |
| | (HEPATOCYTIC TRANSCRIPTION | |
| | FACTOR) (B1-BINDING FACTOR) | |
| | (HB1F) (CYP7A PROMOTER BINDING | |
| | FACTOR) (SEQ ID NO: 11) | |
| 590 | ORPHAN NUCLEAR RECEPTOR NR5A2 | TTTTGATGAAGTTTTGTT (SEQ ID NO: 1965) |
| | (ALPHA-1-FETOPROTEIN | |
| | TRANSCRIPTION FACTOR) | |
| | (HEPATOCYTIC TRANSCRIPTION | |
| | FACTOR) (B1-BINDING FACTOR) | |
| | (HB1F) (CYP7A PROMOTER BINDING | |
| | FACTOR) (SEQ ID NO: 11) | |
| 591 | LIM DOMAIN KINASE 1 (EC | TGTAGTCGGGAGGTTA (SEQ ID NO: 1966) |
| | 2.7.1.37) (LIMK-1) (SEQ ID NO: | |
| | 12) | |
| 592 | LIM DOMAIN KINASE 1 (EC | TGTAGTTGGGAGGTTA (SEQ ID NO: 1967) |
| | 2.7.1.37) (LIMK-1) (SEQ ID NO: | |
| | 12) | |
| 593 | LIM DOMAIN KINASE 1 (EC | TGTAGTCGGGAGGTTA (SEQ ID NO: 1966) |
| | 2.7.1.37) (LIMK-1) (SEQ ID NO: | |
| | 12) | |
| 594 | LIM DOMAIN KINASE 1 (EC | TGTAGTTGGGAGGTTA (SEQ ID NO: 1967) |
| | 2.7.1.37) (LIMK-1) (SEQ ID NO: | |
| | 12) | |
| 595 | LIM DOMAIN KINASE 1 (EC | GGATTATCGCGGGGGT (SEQ ID NO: 1968) |
| | 2.7.1.37) (LIMK-1) (SEQ ID NO: | |
| | 12) | |
| 596 | LIM DOMAIN KINASE 1 (EC | GGATTATTGTGGGGGT (SEQ ID NO: 1969) |
| | 2.7.1.37) (LIMK-1) (SEQ ID NO: | |
| | 12) | |
| 597 | LIM DOMAIN KINASE 1 (EC | GGATTATCGCGGGGGT (SEQ ID NO: 1968) |
| | 2.7.1.37) (LIMK-1) (SEQ ID NO: | |
| | 12) | |
| 598 | LIM DOMAIN KINASE 1 (EC | GGATTATTGTGGGGGT (SEQ ID NO: 1969) |
| | 2.7.1.37) (LIMK-1) (SEQ ID NO: | |
| | 12) | |
| 599 | LIM DOMAIN KINASE 1 (EC | GTCGGTAGTTTATCGGAT (SEQ ID NO: 1970) |
| | 2.7.1.37) (LIMK-1) (SEQ ID NO: | |
| | 12) | |
| 600 | LIM DOMAIN KINASE 1 (EC | GTTGGTAGTTTATTGGAT (SEQ ID NO: 1971) |
| | 2.7.1.37) (LIMK-1) (SEQ ID NO: | |
| | 12) | |
| 601 | LIM DOMAIN KINASE 1 (EC | GTCGGTAGTTTATCGGAT (SEQ ID NO: 1970) |
| | 2.7.1.37) (LIMK-1) (SEQ ID NO: | |
| | 12) | |
| 602 | LIM DOMAIN KINASE 1 (EC | GTTGGTAGTTTATTGGAT (SEQ ID NO: 1971) |
| | 2.7.1.37) (LIMK-1) (SEQ ID NO: | |
| | 12) | |
| 603 | LIM DOMAIN KINASE 1 (EC | TAGGAGACGTTACGTT (SEQ ID NO: 1972) |
| | 2.7.1.37) (LIMK-1) (SEQ ID NO: | |
| | 12) | |
| 604 | LIM DOMAIN KINASE 1 (EC | AGATGTTATGTTAGGGT (SEQ ID NO: 1973) |
| | 2.7.1.37) (LIMK-1) (SEQ ID NO: | |
| | 12) | |
| 605 | BCL11B (SEQ ID NO: 50) | TAGGTTTCGATTCGTT (SEQ ID NO: 1974) |
| 606 | BCL11B (SEQ ID NO: 50) | TTAGGTTTTGATTTGTTT (SEQ ID NO: 1975) |
| 607 | BCL11B (SEQ ID NO: 50) | AAGTCGTCGGAGTTAG (SEQ ID NO: 1976) |
| 608 | BCL11B (SEQ ID NO: 50) | GTGAAGTTGTTGGAGT (SEQ ID NO: 1977) |
| 609 | BCL11B (SEQ ID NO: 50) | TTGAGGCGTTACGGTT (SEQ ID NO: 1978) |
| 610 | BCL11B (SEQ ID NO: 50) | TTGAGGTGTTATGGTT (SEQ ID NO: 1979) |
| 611 | BCL11B (SEQ ID NO: 50) | TTGAGGCGTTACGGTT (SEQ ID NO: 1978) |
| 612 | BCL11B (SEQ ID NO: 50) | TTGAGGTGTTATGGTT (SEQ ID NO: 1979) |
| 613 | MSF (SEQ ID NO: 13) | GTTTCGAAATTGGCGT (SEQ ID NO: 1980) |
| 614 | MSF (SEQ ID NO: 13) | TTTGAAATTGGTGTGG (SEQ ID NO: 1981) |
| 615 | MSF (SEQ ID NO: 13) | TTCGGTTTACGGGTTGTA (SEQ ID NO: 1982) |
| 616 | MSF (SEQ ID NO: 13) | TTTGGTTTATGGGTTGTA (SEQ ID NO: 1983) |
| 617 | MSF (SEQ ID NO: 13) | TTCGGTTTACGGGTTGTA (SEQ ID NO: 1982) |
| 618 | MSF (SEQ ID NO: 13) | TTTGGTTTATGGGTTGTA (SEQ ID NO: 1983) |
| 619 | MSF (SEQ ID NO: 13) | TTACGGTTCGATTTTG (SEQ ID NO: 1984) |
| 620 | MSF (SEQ ID NO: 13) | TATGGTTTGATTTTGGG (SEQ ID NO: 1985) |
| 621 | SEQ ID NO: 14 (SEQ ID NO: 14) | TAAGGCGTTTTCGATA (SEQ ID NO: 1986) |
| 622 | SEQ ID NO: 14 (SEQ ID NO: 14) | GTAAGGTGTTTTTGATAT (SEQ ID NO: 1987) |
| 623 | SEQ ID NO: 14 (SEQ ID NO: 14) | TGGGTGTACGCGTGAA (SEQ ID NO: 1988) |
| 624 | SEQ ID NO: 14 (SEQ ID NO: 14) | TGTATGTGTGAAGGGG (SEQ ID NO: 1989) |
| 625 | SEQ ID NO: 16 (SEQ ID NO: 16) | ATCGTTGGTCGGATTT (SEQ ID NO: 1990) |
| 626 | SEQ ID NO: 16 (SEQ ID NO: 16) | TAGGATTGTTGGTTGGA (SEQ ID NO: 1991) |
| 627 | SEQ ID NO: 16 (SEQ ID NO: 16) | AGGAGTTTTCGTGTCGT (SEQ ID NO: 1992) |
| 628 | SEQ ID NO: 16 (SEQ ID NO: 16) | AGGAGTTTTTGTGTTGT (SEQ ID NO: 1993) |
| 629 | SEQ ID NO: 16 (SEQ ID NO: 16) | AGGAGTTTTCGTGTCGT (SEQ ID NO: 1992) |
| 630 | SEQ ID NO: 16 (SEQ ID NO: 16) | AGGAGTTTTTGTGTTGT (SEQ ID NO: 1993) |
| 631 | SEQ ID NO: 16 (SEQ ID NO: 16) | TTACGGATAGGGCGAT (SEQ ID NO: 1994) |
| 632 | SEQ ID NO: 16 (SEQ ID NO: 16) | TATGGATAGGGTGATTT (SEQ ID NO: 1995) |
| 633 | SEQ ID NO: 16 (SEQ ID NO: 16) | AGGCGTTGTCGGTGAT (SEQ ID NO: 1996) |
| 634 | SEQ ID NO: 16 (SEQ ID NO: 16) | AGGTGTTGTTGGTGATA (SEQ ID NO: 1997) |
| 635 | SEQ ID NO: 17 (SEQ ID NO: 17) | TACGTTTCGGGTTTGTTA (SEQ ID NO: 1998) |
| 636 | SEQ ID NO: 17 (SEQ ID NO: 17) | TATGTTTTGGGTTTGTTA (SEQ ID NO: 1999) |
| 637 | SEQ ID NO: 17 (SEQ ID NO: 17) | TACGTTTCGGGTTTGTTA (SEQ ID NO: 1998) |
| 638 | SEQ ID NO: 17 (SEQ ID NO: 17) | TATGTTTTGGGTTTGTTA (SEQ ID NO: 1999) |
| 639 | SEQ ID NO: 17 (SEQ ID NO: 17) | ATTTAGTCGTGCGTTT (SEQ ID NO: 2000) |
| 640 | SEQ ID NO: 17 (SEQ ID NO: 17) | TGATTTAGTTGTGTGTT (SEQ ID NO: 2001) |
| 641 | SEQ ID NO: 18 (SEQ ID NO: 18) | TTTACGCGGGGTTTTA (SEQ ID NO: 2002) |
| 642 | SEQ ID NO: 18 (SEQ ID NO: 18) | TTTATGTGGGGTTTTAG (SEQ ID NO: 2003) |
| 643 | SEQ ID NO: 18 (SEQ ID NO: 18) | TTACGTCGTTATTAGGT (SEQ ID NO: 2004) |
| 644 | SEQ ID NO: 18 (SEQ ID NO: 18) | TTTTATGTTGTTATTAGGT (SEQ ID NO: 2005) |
| 645 | SEQ ID NO: 18 (SEQ ID NO: 18) | TATTTGGACGTCGGGT (SEQ ID NO: 2006) |
| 646 | SEQ ID NO: 18 (SEQ ID NO: 18) | TATTTGGATGTTGGGT (SEQ ID NO: 2007) |
| 647 | SEQ ID NO: 18 (SEQ ID NO: 18) | TATTTGGACGTCGGGT (SEQ ID NO: 2006) |
| 648 | SEQ ID NO: 18 (SEQ ID NO: 18) | TATTTGGATGTTGGGT (SEQ ID NO: 2007) |
| 649 | SEQ ID NO: 18 (SEQ ID NO: 18) | GAGGCGTATTAGGTCGG (SEQ ID NO: 2008) |
| 650 | SEQ ID NO: 18 (SEQ ID NO: 18) | AGGTGTATTAGGTTGGG (SEQ ID NO: 2009) |
| 651 | SEQ ID NO: 18 (SEQ ID NO: 18) | AAAGCGGAGTCGTTAG (SEQ ID NO: 2010) |
| 652 | SEQ ID NO: 18 (SEQ ID NO: 18) | AGTGGAGTTGTTAGGT (SEQ ID NO: 2011) |
| 653 | SEQ ID NO: 19 (SEQ ID NO: 19) | AGGTTTTCGTTGTAGTA (SEQ ID NO: 2012) |
| 654 | SEQ ID NO: 19 (SEQ ID NO: 19) | TAGGTTTTTGTTGTAGTA (SEQ ID NO: 2013) |
| 655 | SEQ ID NO: 19 (SEQ ID NO: 19) | TGAGATTCGTTTTTTAAA (SEQ ID NO: 2014) |
| 656 | SEQ ID NO: 19 (SEQ ID NO: 19) | GGTGAGATTTGTTTTTTA (SEQ ID NO: 2015) |
| 657 | PRDM6 (SEQ ID NO: 20) | AGTTTTAAGCGTTTGGT (SEQ ID NO: 2016) |
| 658 | PRDM6 (SEQ ID NO: 20) | AGTTTTAAGTGTTTGGT (SEQ ID NO: 2017) |
| 659 | PRDM6 (SEQ ID NO: 20) | AGTTTTAAGCGTTTGGT (SEQ ID NO: 2016) |
| 660 | PRDM6 (SEQ ID NO: 20) | AGTTTTAAGTGTTTGGT (SEQ ID NO: 2017) |
| 661 | PRDM6 (SEQ ID NO: 20) | GAAGTTCGGATTTCGG (SEQ ID NO: 2018) |
| 662 | PRDM6 (SEQ ID NO: 20) | GGAAGTTTGGATTTTGG (SEQ ID NO: 2019) |
| 663 | PRDM6 (SEQ ID NO: 20) | TTGTCGGGTTACGGGA (SEQ ID NO: 2020) |
| 664 | PRDM6 (SEQ ID NO: 20) | GTTGGGTTATGGGAGA (SEQ ID NO: 2021) |
| 665 | PRDM6 (SEQ ID NO: 20) | TTCGTAGAATTGTCGAAG (SEQ ID NO: 2022) |
| 666 | PRDM6 (SEQ ID NO: 20) | TTTGTAGAATTGTTGAAG (SEQ ID NO: 2023) |
| 667 | PRDM6 (SEQ ID NO: 20) | TTCGTAGAATTGTCGAAG (SEQ ID NO: 2022) |
| 668 | PRDM6 (SEQ ID NO: 20) | TTTGTAGAATTGTTGAAG (SEQ ID NO: 2023) |
| 669 | RAP2B (SEQ ID NO: 21) | GGTCGGGTAATCGTTA (SEQ ID NO: 2024) |
| 670 | RAP2B (SEQ ID NO: 21) | GTTGGGTAATTGTTAGA (SEQ ID NO: 2025) |
| 671 | RAP2B (SEQ ID NO: 21) | AGGAAGCGTTTTCGTT (SEQ ID NO: 2026) |
| 672 | RAP2B (SEQ ID NO: 21) | AGAGGAAGTGTTTTTGT (SEQ ID NO: 2027) |
| 673 | NR2E1 (SEQ ID NO: 22) | AATGTAGCGGCGTTAT (SEQ ID NO: 2028) |
| 674 | NR2E1 (SEQ ID NO: 22) | TAAATGTAGTGGTGTTAT (SEQ ID NO: 2029) |
| 675 | NR2E1 (SEQ ID NO: 22) | GTCGTTATCGGTTTGGA (SEQ ID NO: 2030) |
| 676 | NR2E1 (SEQ ID NO: 22) | GTTGTTATTGGTTTGGA (SEQ ID NO: 2031) |
| 677 | NR2E1 (SEQ ID NO: 22) | GTCGTTATCGGTTTGGA (SEQ ID NO: 2030) |
| 678 | NR2E1 (SEQ ID NO: 22) | GTTGTTATTGGTTTGGA (SEQ ID NO: 2031) |
| 679 | NR2E1 (SEQ ID NO: 22) | GACGTAAGTTTCGGGT (SEQ ID NO: 2032) |
| 680 | NR2E1 (SEQ ID NO: 22) | GGATGTAAGTTTTGGG (SEQ ID NO: 2033) |
| 681 | NR2E1 (SEQ ID NO: 22) | TTTTTAGTCGCGAGAA (SEQ ID NO: 2034) |
| 682 | NR2E1 (SEQ ID NO: 22) | TTTTTAGTTGTGAGAAGT (SEQ ID NO: 2035) |
| 683 | NR2E1 (SEQ ID NO: 22) | TTCGGGTGATATCGTTT (SEQ ID NO: 2036) |
| 684 | NR2E1 (SEQ ID NO: 22) | TTTGGGTGATATTGTTT (SEQ ID NO: 2037) |
| 685 | NR2E1 (SEQ ID NO: 22) | TTCGGGTGATATCGTTT (SEQ ID NO: 2036) |
| 686 | NR2E1 (SEQ ID NO: 22) | TTTGGGTGATATTGTTT (SEQ ID NO: 2037) |
| 687 | NR2E1 (SEQ ID NO: 22) | AGGCGAGTCGGAGTTT (SEQ ID NO: 2038) |
| 688 | NR2E1 (SEQ ID NO: 22) | AGGTGAGTTGGAGTTTT (SEQ ID NO: 2039) |
| 689 | NR2E1 (SEQ ID NO: 22) | TAAGTCGAGCGAGTTT (SEQ ID NO: 2040) |
| 690 | NR2E1 (SEQ ID NO: 22) | TAGTAAGTTGAGTGAGT (SEQ ID NO: 2041) |
| 691 | NR2E1 (SEQ ID NO: 22) | AGGGACGCGAAAATTT (SEQ ID NO: 2042) |
| 692 | NR2E1 (SEQ ID NO: 22) | GGAGGGATGTGAAAAT (SEQ ID NO: 2043) |
| 693 | PCDH7 (SEQ ID NO: 23) | ATCGTAGTCGGTTTTA (SEQ ID NO: 2044) |
| 694 | PCDH7 (SEQ ID NO: 23) | GATTATTGTAGTTGGTTT (SEQ ID NO: 2045) |
| 695 | RTTN (SEQ ID NO: 25) | TAGTGGCGCGGTAGTT (SEQ ID NO: 2046) |
| 696 | RTTN (SEQ ID NO: 25) | TAGTGGTGTGGTAGTTT (SEQ ID NO: 2047) |
| 697 | RTTN (SEQ ID NO: 25) | TAGGACGTGTTTTCGG (SEQ ID NO: 2048) |
| 698 | RTTN (SEQ ID NO: 25) | AGGATGTGTTTTTGGG (SEQ ID NO: 2049) |
| 699 | SNAP25 (SEQ ID NO: 33) | TATTTCGAGTTAGAGTTACGA (SEQ ID NO: |
| | | 2050) |
| 700 | SNAP25 (SEQ ID NO: 33) | TATTTTGAGTTAGAGTTATGA (SEQ ID NO: |
| | | 2051) |
| 701 | SNAP25 (SEQ ID NO: 33) | TATTTCGAGTTAGAGTTACGA (SEQ ID NO: |
| | | 2050) |
| 702 | SNAP25 (SEQ ID NO: 33) | TATTTTGAGTTAGAGTTATGA (SEQ ID NO: |
| | | 2051) |
| 703 | SNAP25 (SEQ ID NO: 33) | ATACGGAATATCGTATTT (SEQ ID NO: 2052) |
| 704 | SNAP25 (SEQ ID NO: 33) | GTGTATATATGGAATATTGT (SEQ ID NO: |
| | | 2053) |
| 705 | SEQ ID NO: 26 (SEQ ID NO: 26) | TTAAGTATCGAGGCGT (SEQ ID NO: 2054) |
| 706 | SEQ ID NO: 26 (SEQ ID NO: 26) | TTTTAAGTATTGAGGTGT (SEQ ID NO: 2055) |
| 707 | SEQ ID NO: 26 (SEQ ID NO: 26) | AATTTTGGTCGTTTAGT (SEQ ID NO: 2056) |
| 708 | SEQ ID NO: 26 (SEQ ID NO: 26) | AAATTTTGGTTGTTTAGT (SEQ ID NO: 2057) |
| 709 | SEQ ID NO: 26 (SEQ ID NO: 26) | TTCGTATTGACGTTAAT (SEQ ID NO: 2058) |
| 710 | SEQ ID NO: 26 (SEQ ID NO: 26) | TTTGTATTGATGTTAATAGA (SEQ ID NO: |
| | | 2059) |
| 711 | GIRK2 (SEQ ID NO: 27) | AGTTGTTCGTAGGCGA (SEQ ID NO: 2060) |
| 712 | GIRK2 (SEQ ID NO: 27) | AGTTGTTTGTAGGTGA (SEQ ID NO: 2061) |
| 713 | GIRK2 (SEQ ID NO: 27) | AGTTGTTCGTAGGCGA (SEQ ID NO: 2060) |
| 714 | GIRK2 (SEQ ID NO: 27) | AGTTGTTTGTAGGTGA (SEQ ID NO: 2061) |
| 715 | GIRK2 (SEQ ID NO: 27) | TTATTTCGTTCGTAGTT (SEQ ID NO: 2062) |
| 716 | GIRK2 (SEQ ID NO: 27) | TTTGTTTGTAGTTAGGTA (SEQ ID NO: 2063) |
| 717 | GIRK2 (SEQ ID NO: 27) | TTAGTCGAAAGGCGAG (SEQ ID NO: 2064) |
| 718 | GIRK2 (SEQ ID NO: 27) | TAGTTGAAAGGTGAGG (SEQ ID NO: 2065) |
| 719 | SEQ ID NO: 28 (SEQ ID NO: 28) | ATTAGGCGAGTTTCGT (SEQ ID NO: 2066) |
| 720 | SEQ ID NO: 28 (SEQ ID NO: 28) | TTAGGTGAGTTTTGTTT (SEQ ID NO: 2067) |
| 721 | SEQ ID NO: 31 (SEQ ID NO: 31) | TTTACGTAGGGCGATT (SEQ ID NO: 2068) |
| 722 | SEQ ID NO: 31 (SEQ ID NO: 31) | ATTTTTATGTAGGGTGAT (SEQ ID NO: 2069) |
| 723 | SEQ ID NO: 31 (SEQ ID NO: 31) | GATACGGTTAGGCGGG (SEQ ID NO: 2070) |
| 724 | SEQ ID NO: 31 (SEQ ID NO: 31) | GATATGGTTAGGTGGG (SEQ ID NO: 2071) |
| 725 | SEQ ID NO: 31 (SEQ ID NO: 31) | GATACGGTTAGGCGGG (SEQ ID NO: 2070) |
| 726 | SEQ ID NO: 31 (SEQ ID NO: 31) | GATATGGTTAGGTGGG (SEQ ID NO: 2071) |
| 727 | SEQ ID NO: 31 (SEQ ID NO: 31) | TTCGGGCGTTTTATAT (SEQ ID NO: 2072) |
| 728 | SEQ ID NO: 31 (SEQ ID NO: 31) | GGTTTGGGTGTTTTATA (SEQ ID NO: 2073) |
| 729 | HOXB13 (SEQ ID NO: 34) | GTCGTTATTATTTCGAGG (SEQ ID NO: 2074) |
| 730 | HOXB13 (SEQ ID NO: 34) | GTTGTTATTATTTTGAGGA (SEQ ID NO: 2075) |
| 731 | HOXB13 (SEQ ID NO: 34) | AAGTTAGCGGGTTCGT (SEQ ID NO: 2076) |
| 732 | HOXB13 (SEQ ID NO: 34) | AAGTTAGTGGGTTTGT (SEQ ID NO: 2077) |
| 733 | HOXB13 (SEQ ID NO: 34) | AAGTTAGCGGGTTCGT (SEQ ID NO: 2076) |
| 734 | HOXB13 (SEQ ID NO: 34) | AAGTTAGTGGGTTTGT (SEQ ID NO: 2077) |
| 735 | HOXB13 (SEQ ID NO: 34) | TTGGTCGCGTAGTAAA (SEQ ID NO: 2078) |
| 736 | HOXB13 (SEQ ID NO: 34) | TGGTTGTGTAGTAAAGT (SEQ ID NO: 2079) |
| 737 | (SEQ ID NO: 35) | GGAGGTGCGAATTTAA (SEQ ID NO: 2080) |
| 738 | (SEQ ID NO: 35) | GGGAGGTGTGAATTTA (SEQ ID NO: 2081) |
| 739 | (SEQ ID NO: 35) | AAATAGTCGTTTGGGA (SEQ ID NO: 2082) |
| 740 | (SEQ ID NO: 35) | AAATAGTTGTTTGGGAG (SEQ ID NO: 2083) |
| 741 | (SEQ ID NO: 35) | AGAAAATATACGAGATTTAT (SEQ ID NO: |
| | | 2084) |
| 742 | (SEQ ID NO: 35) | AGAAAATATATGAGATTTATT (SEQ ID NO: |
| | | 2085) |
| 743 | (SEQ ID NO: 35) | TAAAGACGGGAAGAGA (SEQ ID NO: 2086) |
| 744 | (SEQ ID NO: 35) | ATAAAGATGGGAAGAGA (SEQ ID NO: 2087) |
| 745 | MGC10561 (SEQ ID NO: 37) | TTTTTTACGTTAAGGGG (SEQ ID NO: 2088) |
| 746 | MGC10561 (SEQ ID NO: 37) | TTTTTATGTTAAGGGGG (SEQ ID NO: 2089) |
| 747 | MGC10561 (SEQ ID NO: 37) | TTTGTTTTTCGAGTAGA (SEQ ID NO: 2090) |
| 748 | MGC10561 (SEQ ID NO: 37) | TGTTTTTTGAGTAGAGG (SEQ ID NO: 2091) |
| 749 | LMX1A (SEQ ID NO: 38) | GTCGGGTTTTTCGGAA (SEQ ID NO: 2092) |
| 750 | LMX1A (SEQ ID NO: 38) | GTTGGGTTTTTTGGAAG (SEQ ID NO: 2093) |
| 751 | LMX1A (SEQ ID NO: 38) | GTCGAGATTTTATCGAAA (SEQ ID NO: 2094) |
| 752 | LMX1A (SEQ ID NO: 38) | GTTGAGATTTTATTGAAAG (SEQ ID NO: 2095) |
| 753 | LMX1A (SEQ ID NO: 38) | AGTATTCGGGCGGGTA (SEQ ID NO: 2096) |
| 754 | LMX1A (SEQ ID NO: 38) | GTAGTATTTGGGTGGG (SEQ ID NO: 2097) |
| 755 | LMX1A (SEQ ID NO: 38) | AACGAAATTACGTGTAT (SEQ ID NO: 2098) |
| 756 | LMX1A (SEQ ID NO: 38) | TGAAATGAAATTATGTGTA (SEQ ID NO: 2099) |
| 757 | GS1 (SEQ ID NO: 40) | TGCGAGTTAGCGGTTA (SEQ ID NO: 2100) |
| 758 | GS1 (SEQ ID NO: 40) | TTGTGAGTTAGTGGTT (SEQ ID NO: 2101) |
| 759 | GS1 (SEQ ID NO: 40) | AGTTTCGAGGTTTTCGG (SEQ ID NO: 2102) |
| 760 | GS1 (SEQ ID NO: 40) | AAGTTTTGAGGTTTTTGG (SEQ ID NO: 2103) |
| 761 | TITF1 (SEQ ID NO: 41) | GTCGTGGGGATCGTAT (SEQ ID NO: 2104) |
| 762 | TITF1 (SEQ ID NO: 41) | GTTGTGGGGATTGTAT (SEQ ID NO: 2105) |
| 763 | TITF1 (SEQ ID NO: 41) | GTCGTGGGGATCGTAT (SEQ ID NO: 2104) |
| 764 | TITF1 (SEQ ID NO: 41) | GTTGTGGGGATTGTAT (SEQ ID NO: 2105) |
| 765 | TITF1 (SEQ ID NO: 41) | GGTTCGTTTAAGTTCGG (SEQ ID NO: 2106) |
| 766 | TITF1 (SEQ ID NO: 41) | GGTTTGTTTAAGTTTGG (SEQ ID NO: 2107) |
| 767 | TITF1 (SEQ ID NO: 41) | GGTTCGTTTAAGTTCGG (SEQ ID NO: 2106) |
| 768 | TITF1 (SEQ ID NO: 41) | GGTTTGTTTAAGTTTGG (SEQ ID NO: 2107) |
| 769 | TITF1 (SEQ ID NO: 41) | TTAGGTCGCGTTTGTA (SEQ ID NO: 2108) |
| 770 | TITF1 (SEQ ID NO: 41) | AGGTTGTGTTTGTAGA (SEQ ID NO: 2109) |
| 771 | TITF1 (SEQ ID NO: 41) | TATTTCGTTTTCGTAATT (SEQ ID NO: 2110) |
| 772 | TITF1 (SEQ ID NO: 41) | TTTGTTTTTGTAATTAGATT (SEQ ID NO: |
| | | 2111) |
| 773 | DDX51 (SEQ ID NO: 43) | AGATTTTCGGCGAGAT (SEQ ID NO: 2112) |
| 774 | DDX51 (SEQ ID NO: 43) | ATTTTTGGTGAGATAGG (SEQ ID NO: 2113) |
| 775 | DDX51 (SEQ ID NO: 43) | TACGTGTGGTTTTCGGTA (SEQ ID NO: 2114) |
| 776 | DDX51 (SEQ ID NO: 43) | TATGTGTGGTTTTTGGTA (SEQ ID NO: 2115) |
| 777 | DDX51 (SEQ ID NO: 43) | TACGTGTGGTTTTCGGTA (SEQ ID NO: 2114) |
| 778 | DDX51 (SEQ ID NO: 43) | TATGTGTGGTTTTTGGTA (SEQ ID NO: 2115) |
| 779 | DDX51 (SEQ ID NO: 43) | AACGTGCGGGGTTTTT (SEQ ID NO: 2116) |
| 780 | DDX51 (SEQ ID NO: 43) | TGAATGTGTGGGGTTT (SEQ ID NO: 2117) |
| 781 | SEQ ID NO: 45 (SEQ ID NO: 45) | AGCGAACGTTTATTTT (SEQ ID NO: 2118) |
| 782 | SEQ ID NO: 45 (SEQ ID NO: 45) | TAGGAGAGTGAATGTTT (SEQ ID NO: 2119) |
| 783 | SEQ ID NO: 46 (SEQ ID NO: 46) | GAGTCGGGTTATCGTT (SEQ ID NO: 2120) |
| 784 | SEQ ID NO: 46 (SEQ ID NO: 46) | GGAGTTGGGTTATTGT (SEQ ID NO: 2121) |
| 785 | SEQ ID NO: 46 (SEQ ID NO: 46) | TTACGGATGTTTCGGT (SEQ ID NO: 2122) |
| 786 | SEQ ID NO: 46 (SEQ ID NO: 46) | TTTATGGATGTTTTGGT (SEQ ID NO: 2123) |
| 787 | SEQ ID NO: 46 (SEQ ID NO: 46) | TGACGTATTTTCGGTT (SEQ ID NO: 2124) |
| 788 | SEQ ID NO: 46 (SEQ ID NO: 46) | GGTGATGTATTTTTGGT (SEQ ID NO: 2125) |
| 789 | SEQ ID NO: 46 (SEQ ID NO: 46) | ATAGTCGGAATCGTTG (SEQ ID NO: 2126) |
| 790 | SEQ ID NO: 46 (SEQ ID NO: 46) | TAGTTGGAATTGTTGTT (SEQ ID NO: 2127) |
| 791 | SEQ ID NO: 2 (SEQ ID NO: 2) | ATTGGGTTTCGCGTAGG (SEQ ID NO: 2128) |
| 792 | SEQ ID NO: 2 (SEQ ID NO: 2) | ATTGGGTTTTGTGTAGG (SEQ ID NO: 2129) |
| 793 | SEQ ID NO: 2 (SEQ ID NO: 2) | ATTGGGTTTCGCGTAGG (SEQ ID NO: 2128) |
| 794 | SEQ ID NO: 2 (SEQ ID NO: 2) | ATTGGGTTTTGTGTAGG (SEQ ID NO: 2129) |
| 795 | SEQ ID NO: 2 (SEQ ID NO: 2) | TAGTAGTCGGCGGGAG (SEQ ID NO: 2130) |
| 796 | SEQ ID NO: 2 (SEQ ID NO: 2) | TAGTAGTTGGTGGGAG (SEQ ID NO: 2131) |
| 797 | SEQ ID NO: 2 (SEQ ID NO: 2) | TAGTAGTCGGCGGGAG (SEQ ID NO: 2130) |
| 798 | SEQ ID NO: 2 (SEQ ID NO: 2) | TAGTAGTTGGTGGGAG (SEQ ID NO: 2131) |
| 799 | SEQ ID NO: 2 (SEQ ID NO: 2) | TTGATTGGCGGACGAG (SEQ ID NO: 1706) |
| 800 | SEQ ID NO: 2 (SEQ ID NO: 2) | TTGATTGGTGGATGAG (SEQ ID NO: 1707) |
| 801 | SEQ ID NO: 2 (SEQ ID NO: 2) | TTGATTGGCGGACGAG (SEQ ID NO: 1706) |
| 802 | SEQ ID NO: 2 (SEQ ID NO: 2) | TTGATTGGTGGATGAG (SEQ ID NO: 1707) |
| 803 | SEQ ID NO: 3 (SEQ ID NO: 3) | TTGCGTTAATTCGGTA (SEQ ID NO: 2132) |
| 804 | SEQ ID NO: 3 (SEQ ID NO: 3) | AATTTGTGTTAATTTGGT (SEQ ID NO: 2133) |
| 805 | SEQ ID NO: 3 (SEQ ID NO: 3) | AGTCGGGAGAGCGAAA (SEQ ID NO: 2134) |
| 806 | SEQ ID NO: 3 (SEQ ID NO: 3) | AGTTGGGAGAGTGAAA (SEQ ID NO: 2135) |
| 807 | SEQ ID NO: 3 (SEQ ID NO: 3) | AGTCGGGAGAGCGAAA (SEQ ID NO: 2134) |
| 808 | SEQ ID NO: 3 (SEQ ID NO: 3) | AGTTGGGAGAGTGAAA (SEQ ID NO: 2135) |
| 809 | SEQ ID NO: 3 (SEQ ID NO: 3) | GGTCGAAGAGTCGGGA (SEQ ID NO: 2136) |
| 810 | SEQ ID NO: 3 (SEQ ID NO: 3) | GGTTGAAGAGTTGGGA (SEQ ID NO: 2137) |
| 811 | SEQ ID NO: 3 (SEQ ID NO: 3) | GGTCGAAGAGTCGGGA (SEQ ID NO: 2136) |
| 812 | SEQ ID NO: 3 (SEQ ID NO: 3) | GGTTGAAGAGTTGGGA (SEQ ID NO: 2137) |
| 813 | SEQ ID NO: 3 (SEQ ID NO: 3) | ATGTTAGCGGGTCGAA (SEQ ID NO: 2138) |
| 814 | SEQ ID NO: 3 (SEQ ID NO: 3) | ATGTTAGTGGGTTGAA (SEQ ID NO: 2139) |
| 815 | SEQ ID NO: 3 (SEQ ID NO: 3) | ATGTTAGCGGGTCGAA (SEQ ID NO: 2138) |
| 816 | SEQ ID NO: 3 (SEQ ID NO: 3) | ATGTTAGTGGGTTGAA (SEQ ID NO: 2139) |

TABLE 17
Breast cancer vs. other cancer

| | | |
|---|---|---|
| No: | Gene | Oligo: |

| | | |
|---|---|---|
| 1 | SCGB3A1 (SEQ ID NO: 115) | GGCGTAGAAGGCGTTT (SEQ ID NO: 2140) |
| 2 | SCGB3A1 (SEQ ID NO: 115) | GGTGTAGAAGGTGTTT (SEQ ID NO: 2141) |
| 3 | SCGB3A1 (SEQ ID NO: 115) | GGCGTAGAAGGCGTTT (SEQ ID NO: 2140) |
| 4 | SCGB3A1 (SEQ ID NO: 115) | GGTGTAGAAGGTGTTT (SEQ ID NO: 2141) |
| 5 | SCGB3A1 (SEQ ID NO: 115) | TAGTGTTCGACGTTGT (SEQ ID NO: 1475) |
| 6 | SCGB3A1 (SEQ ID NO: 115) | TAGTGTTTGATGTTGTT (SEQ ID NO: 1476) |
| 7 | ARH1/NOEY2 (SEQ ID NO: 97) | TAAAACGTTCGGTAGG (SEQ ID NO: 1485) |
| 8 | ARH1/NOEY2 (SEQ ID NO: 97) | TTTAAAATGTTTGGTAGG (SEQ ID NO: 1486) |
| 9 | ARH1/NOEY2 (SEQ ID NO: 97) | TGTATTCGTCGTTAGG (SEQ ID NO: 1487) |
| 10 | ARH1/NOEY2 (SEQ ID NO: 97) | AATGTATTTGTTGTTAGG (SEQ ID NO: 1488) |
| 11 | ARH1/NOEY2 (SEQ ID NO: 97) | TTAGACGGAGTTCGGA (SEQ ID NO: 1489) |
| 12 | ARH1/NOEY2 (SEQ ID NO: 97) | TAGATGGAGTTTGGAGA (SEQ ID NO: 1490) |
| 13 | ARH1/NOEY2 (SEQ ID NO: 97) | TAGACGTAGGCGTATT (SEQ ID NO: 1491) |
| 14 | ARH1/NOEY2 (SEQ ID NO: 97) | GGGTAGATGTAGGTGT (SEQ ID NO: 1492) |
| 15 | CCND2 (SEQ ID NO: 104) | TTAGGGTCGATCGTGT (SEQ ID NO: 1493) |
| 16 | CCND2 (SEQ ID NO: 104) | TAGGGTTGATTGTGTT (SEQ ID NO: 1494) |
| 17 | CCND2 (SEQ ID NO: 104) | TTATCGTAGTCGGTTT (SEQ ID NO: 1495) |
| 18 | CCND2 (SEQ ID NO: 104) | GATTTTATTGTAGTTGGT (SEQ ID NO: 1496) |
| 19 | CCND2 (SEQ ID NO: 104) | GAGTGAGGCGCGAAAT (SEQ ID NO: 1497) |
| 20 | CCND2 (SEQ ID NO: 104) | GAGTGAGGTGTGAAAT (SEQ ID NO: 1498) |
| 21 | CCND2 (SEQ ID NO: 104) | GAGTGAGGCGCGAAAT (SEQ ID NO: 1497) |
| 22 | CCND2 (SEQ ID NO: 104) | GAGTGAGGTGTGAAAT (SEQ ID NO: 1498) |
| 23 | CCND2 (SEQ ID NO: 104) | AAGGATCGAGCGTGGA (SEQ ID NO: 1499) |
| 24 | CCND2 (SEQ ID NO: 104) | AAGGATTGAGTGTGGA (SEQ ID NO: 1500) |
| 25 | CCND2 (SEQ ID NO: 104) | AAGGATCGAGCGTGGA (SEQ ID NO: 1499) |
| 26 | CCND2 (SEQ ID NO: 104) | AAGGATTGAGTGTGGA (SEQ ID NO: 1500) |
| 27 | CDKN1A (SEQ ID NO: 67) | ATTAGGGTCGCGTTGA (SEQ ID NO: 1501) |
| 28 | CDKN1A (SEQ ID NO: 67) | ATTAGGGTTGTGTTGA (SEQ ID NO: 1502) |
| 29 | CDKN1A (SEQ ID NO: 67) | ATTAGGGTCGCGTTGA (SEQ ID NO: 1501) |
| 30 | CDKN1A (SEQ ID NO: 67) | ATTAGGGTTGTGTTGA (SEQ ID NO: 1502) |
| 31 | CDKN2A (SEQ ID NO: 57) | GGCGTTGTTTAACGTAT (SEQ ID NO: 1503) |
| 32 | CDKN2A (SEQ ID NO: 57) | GGGTGTTGTTTAATGTA (SEQ ID NO: 1504) |
| 33 | DAPK1 (SEQ ID NO: 98) | TTTCGGAGATTCGGTT (SEQ ID NO: 1509) |
| 34 | DAPK1 (SEQ ID NO: 98) | TTTGGAGATTTGGTTTT (SEQ ID NO: 1510) |
| 35 | DAPK1 (SEQ ID NO: 98) | TTTTAGCGTCGGGGAG (SEQ ID NO: 1511) |
| 36 | DAPK1 (SEQ ID NO: 98) | TTTTAGTGTTGGGGAG (SEQ ID NO: 1512) |
| 37 | DAPK1 (SEQ ID NO: 98) | TTTTAGCGTCGGGGAG (SEQ ID NO: 1511) |
| 38 | DAPK1 (SEQ ID NO: 98) | TTTTAGTGTTGGGGAG (SEQ ID NO: 1512) |
| 39 | EYA4 (SEQ ID NO: 58) | GGTATAAAATCGTAAATTTT (SEQ ID NO: |
| | | 1513) |
| 40 | EYA4 (SEQ ID NO: 58) | GGGTATAAAATTGTAAATTT (SEQ ID NO: |
| | | 1514) |
| 41 | EYA4 (SEQ ID NO: 58) | TATGTAGTCGCGTAGT (SEQ ID NO: 1515) |
| 42 | EYA4 (SEQ ID NO: 58) | TTTATGTAGTTGTGTAGT (SEQ ID NO: 1516) |
| 43 | EYA4 (SEQ ID NO: 58) | GTTTAGATACGAAATGTT (SEQ ID NO: 1517) |
| 44 | EYA4 (SEQ ID NO: 58) | GTTTAGATATGAAATGTTAT (SEQ ID NO: |
| | | 1518) |
| 45 | EYA4 (SEQ ID NO: 58) | AGTTTTGACGTCGTTT (SEQ ID NO: 1519) |
| 46 | EYA4 (SEQ ID NO: 58) | TTGATGTTGTTTTGGAA (SEQ ID NO: 1520) |
| 47 | FHIT (SEQ ID NO: 76) | GTTACGTTAGCGGGTT (SEQ ID NO: 1521) |
| 48 | FHIT (SEQ ID NO: 76) | GGTTATGTTAGTGGGT (SEQ ID NO: 1522) |
| 49 | GSTP1 (SEQ ID NO: 59) | GGCGATTTCGGGGATT (SEQ ID NO: 1525) |
| 50 | GSTP1 (SEQ ID NO: 59) | GGTGATTTTGGGGATTT (SEQ ID NO: 1526) |
| 51 | GSTP1 (SEQ ID NO: 59) | GACGTTCGGGGTGTAG (SEQ ID NO: 1527) |
| 52 | GSTP1 (SEQ ID NO: 59) | GATGTTTGGGGTGTAG (SEQ ID NO: 1528) |
| 53 | GSTP1 (SEQ ID NO: 59) | GACGTTCGGGGTGTAG (SEQ ID NO: 1527) |
| 54 | GSTP1 (SEQ ID NO: 59) | GATGTTTGGGGTGTAG (SEQ ID NO: 1528) |
| 55 | GSTP1 (SEQ ID NO: 59) | AGTTCGCGGGATTTTT (SEQ ID NO: 1529) |
| 56 | GSTP1 (SEQ ID NO: 59) | GGAGTTTGTGGGATTT (SEQ ID NO: 1530) |
| 57 | GSTP1 (SEQ ID NO: 59) | AGTTTTCGTTATTAGTGA (SEQ ID NO: 1531) |
| 58 | GSTP1 (SEQ ID NO: 59) | TAGTTTTTGTTATTAGTGA (SEQ ID NO: 1532) |
| 59 | HIC1 (SEQ ID NO: 85) | TATCGAAGTTTTCGGG (SEQ ID NO: 1533) |
| 60 | HIC1 (SEQ ID NO: 85) | TATTGAAGTTTTTGGGT (SEQ ID NO: 1534) |
| 61 | HIC1 (SEQ ID NO: 85) | TAGCGGTTATTTCGGT (SEQ ID NO: 1535) |
| 62 | HIC1 (SEQ ID NO: 85) | TTTAGTGGTTATTTTGGT (SEQ ID NO: 1536) |
| 63 | HIC1 (SEQ ID NO: 85) | TACGTTTTTCGTAGCGT (SEQ ID NO: 1537) |
| 64 | HIC1 (SEQ ID NO: 85) | ATTATGTTTTTTGTAGTGT (SEQ ID NO: 1538) |
| 65 | HIC1 (SEQ ID NO: 85) | TTCGGTTTTGTCGTATA (SEQ ID NO: 1539) |
| 66 | HIC1 (SEQ ID NO: 85) | TTTGGTTTTGTTGTATAG (SEQ ID NO: 1540) |
| 67 | SERPINB5 (SEQ ID NO: 68) | ATTGTCGTACGTATGT (SEQ ID NO: 1551) |
| 68 | SERPINB5 (SEQ ID NO: 68) | AGAGGATTGTTGTATGTA (SEQ ID NO: 1552) |
| 69 | SERPINB5 (SEQ ID NO: 68) | TTTTTTGTTCGAATATGT (SEQ ID NO: 1553) |
| 70 | SERPINB5 (SEQ ID NO: 68) | TTTGTTTGAATATGTTGG (SEQ ID NO: 1554) |
| 71 | TERT (SEQ ID NO: 92) | TATAACGAACGTCGTT (SEQ ID NO: 2142) |
| 72 | TERT (SEQ ID NO: 92) | AGGTATAATGAATGTTGT (SEQ ID NO: 2143) |
| 73 | TGFBR2 (SEQ ID NO: 93) | AAGACGGTTAGGTCGG (SEQ ID NO: 2144) |
| 74 | TGFBR2 (SEQ ID NO: 93) | AAGATGGTTAGGTTGG (SEQ ID NO: 2145) |
| 75 | TGFBR2 (SEQ ID NO: 93) | AAGACGGTTAGGTCGG (SEQ ID NO: 2144) |
| 76 | TGFBR2 (SEQ ID NO: 93) | AAGATGGTTAGGTTGG (SEQ ID NO: 2145) |
| 77 | THRB (SEQ ID NO: 106) | GGGCGGTTAAGTCGAG (SEQ ID NO: 1569) |
| 78 | THRB (SEQ ID NO: 106) | GGGTGGTTAAGTTGAG (SEQ ID NO: 1570) |
| 79 | THRB (SEQ ID NO: 106) | GGGCGGTTAAGTCGAG (SEQ ID NO: 1569) |
| 80 | THRB (SEQ ID NO: 106) | GGGTGGTTAAGTTGAG (SEQ ID NO: 1570) |
| 81 | TIMP3 (SEQ ID NO: 103) | TTATTAACGGAGGAAGG (SEQ ID NO: 1571) |
| 82 | TIMP3 (SEQ ID NO: 103) | TATTAATGGAGGAAGGG (SEQ ID NO: 1572) |
| 83 | TIMP3 (SEQ ID NO: 103) | TTCGTTATGTGTACGGAA (SEQ ID NO: 1573) |
| 84 | TIMP3 (SEQ ID NO: 103) | TTTGTTATGTGTATGGAA (SEQ ID NO: 1574) |
| 85 | TIMP3 (SEQ ID NO: 103) | TTCGTTATGTGTACGGAA (SEQ ID NO: 1573) |
| 86 | TIMP3 (SEQ ID NO: 103) | TTTGTTATGTGTATGGAA (SEQ ID NO: 1574) |
| 87 | TIMP3 (SEQ ID NO: 103) | GAGTATTTCGAGTTTGT (SEQ ID NO: 1575) |
| 88 | TIMP3 (SEQ ID NO: 103) | AGTATTTTGAGTTTGTATT (SEQ ID NO: 1576) |
| 89 | TIMP3 (SEQ ID NO: 103) | TAAGCGTTAATCGAGT (SEQ ID NO: 1577) |
| 90 | TIMP3 (SEQ ID NO: 103) | TAGGTAAGTGTTAATTGA (SEQ ID NO: 1578) |
| 91 | TP73 (SEQ ID NO: 86) | TAGGATTCGCGTTTTT (SEQ ID NO: 1579) |
| 92 | TP73 (SEQ ID NO: 86) | GGTAGGATTTGTGTTTT (SEQ ID NO: 1580) |
| 93 | CDH13 (SEQ ID NO: 70) | TAGTCGCGTGTATGAA (SEQ ID NO: 1585) |
| 94 | CDH13 (SEQ ID NO: 70) | TGTAGTTGTGTGTATGA (SEQ ID NO: 1586) |
| 95 | TMS1/ASC (SEQ ID NO: 84) | TTCGTTTCGGAGTCGA (SEQ ID NO: 1591) |
| 96 | TMS1/ASC (SEQ ID NO: 84) | TTTGTTTTGGAGTTGAT (SEQ ID NO: 1592) |
| 97 | APAF1 (SEQ ID NO: 82) | GTGTCGTAGCGGTATT (SEQ ID NO: 1593) |
| 98 | APAF1 (SEQ ID NO: 82) | GGTGTTGTAGTGGTAT (SEQ ID NO: 1594) |
| 99 | APAF1 (SEQ ID NO: 82) | AGTAGCGTCGGGTTTT (SEQ ID NO: 1595) |
| 100 | APAF1 (SEQ ID NO: 82) | GAGTAGTGTTGGGTTT (SEQ ID NO: 1596) |
| 101 | SYK (SEQ ID NO: 60) | GAAGTTATCGCGTTGG (SEQ ID NO: 1597) |
| 102 | SYK (SEQ ID NO: 60) | AGAAGTTATTGTGTTGG (SEQ ID NO: 1598) |
| 103 | SYK (SEQ ID NO: 60) | GATCGATGCGGTTTAT (SEQ ID NO: 1599) |
| 104 | SYK (SEQ ID NO: 60) | GGGATTGATGTGGTTT (SEQ ID NO: 1600) |
| 105 | SYK (SEQ ID NO: 60) | TTATTCGGTCGGGATT (SEQ ID NO: 1603) |
| 106 | SYK (SEQ ID NO: 60) | TTTATTTGGTTGGGATT (SEQ ID NO: 1604) |
| 107 | FABP3 (SEQ ID NO: 77) | TAAAGCGGTAGTTCGG (SEQ ID NO: 1609) |
| 108 | FABP3 (SEQ ID NO: 77) | AAGTGGTAGTTTGGGT (SEQ ID NO: 1610) |
| 109 | FABP3 (SEQ ID NO: 77) | TATTGGCGTTGACGTA (SEQ ID NO: 1611) |
| 110 | FABP3 (SEQ ID NO: 77) | TGGTGTTGATGTAGGT (SEQ ID NO: 1612) |
| 111 | RASSF1A (SEQ ID NO: 90) | TACGGGTATTTTCGCGT (SEQ ID NO: 1613) |
| 112 | RASSF1A (SEQ ID NO: 90) | ATATGGGTATTTTTGTGT (SEQ ID NO: 1614) |
| 113 | RASSF1A (SEQ ID NO: 90) | AGAGCGCGTTTAGTTT (SEQ ID NO: 1615) |
| 114 | RASSF1A (SEQ ID NO: 90) | GAGAGTGTGTTTAGTTT (SEQ ID NO: 1616) |
| 115 | RASSF1A (SEQ ID NO: 90) | AGTAAATCGGATTAGGA (SEQ ID NO: 1617) |
| 116 | RASSF1A (SEQ ID NO: 90) | AGTAAATTGGATTAGGAG (SEQ ID NO: 1618) |
| 117 | TWIST (SEQ ID NO: 100) | AGTAAAGGCGTTGCGT (SEQ ID NO: 1619) |
| 118 | TWIST (SEQ ID NO: 100) | AGTAAAGGTGTTGTGT (SEQ ID NO: 1620) |
| 119 | TWIST (SEQ ID NO: 100) | AGTAAAGGCGTTGCGT (SEQ ID NO: 1619) |
| 120 | TWIST (SEQ ID NO: 100) | AGTAAAGGTGTTGTGT (SEQ ID NO: 1620) |
| 121 | TWIST (SEQ ID NO: 100) | TATTTTTCGAGGCGTA (SEQ ID NO: 1621) |
| 122 | TWIST (SEQ ID NO: 100) | TTTTGAGGTGTAGTTTT (SEQ ID NO: 1622) |
| 123 | TWIST (SEQ ID NO: 100) | ATTGGGTCGTTGTAGA (SEQ ID NO: 1623) |
| 124 | TWIST (SEQ ID NO: 100) | ATTGGGTTGTTGTAGA (SEQ ID NO: 1624) |
| 125 | TWIST (SEQ ID NO: 100) | ATTGGGTCGTTGTAGA (SEQ ID NO: 1623) |
| 126 | TWIST (SEQ ID NO: 100) | ATTGGGTTGTTGTAGA (SEQ ID NO: 1624) |
| 127 | TWIST (SEQ ID NO: 100) | TAGGTCGGGACGTAAA (SEQ ID NO: 1625) |
| 128 | TWIST (SEQ ID NO: 100) | AGTAGGTTGGGATGTA (SEQ ID NO: 1626) |
| 129 | ESR2 (SEQ ID NO: 91) | ATAAGCGATTTAACGAT (SEQ ID NO: 1629) |
| 130 | ESR2 (SEQ ID NO: 91) | AAGTGATTTAATGATAAGT (SEQ ID NO: 1630) |
| 131 | PLAU (SEQ ID NO: 62) | TATTTGTCGCGTTGAT (SEQ ID NO: 1633) |
| 132 | PLAU (SEQ ID NO: 62) | ATTTGTTGTGTTGATGA (SEQ ID NO: 1634) |
| 133 | PLAU (SEQ ID NO: 62) | TGTAATTCGGGGATTT (SEQ ID NO: 1635) |
| 134 | PLAU (SEQ ID NO: 62) | TTGTAATTTGGGGATTT (SEQ ID NO: 1636) |
| 135 | PLAU (SEQ ID NO: 62) | TTGGAGATCGCGTTTT (SEQ ID NO: 1637) |
| 136 | PLAU (SEQ ID NO: 62) | TTGGAGATTGTGTTTTT (SEQ ID NO: 1638) |
| 137 | PLAU (SEQ ID NO: 62) | GAGCGTTGCGGAAGTA (SEQ ID NO: 1639) |
| 138 | PLAU (SEQ ID NO: 62) | GAGTGTTGTGGAAGTA (SEQ ID NO: 1640) |
| 139 | PLAU (SEQ ID NO: 62) | GAGCGTTGCGGAAGTA (SEQ ID NO: 1639) |
| 140 | PLAU (SEQ ID NO: 62) | GAGTGTTGTGGAAGTA (SEQ ID NO: 1640) |
| 141 | STAT1 (SEQ ID NO: 109) | GTTATTTTCGAGAGTTG (SEQ ID NO: 1641) |
| 142 | STAT1 (SEQ ID NO: 109) | GTTATTTTTGAGAGTTGT (SEQ ID NO: 1642) |
| 143 | LOT1 (SEQ ID NO: 95) | ATGGGTACGTTTAAGG (SEQ ID NO: 1649) |
| 144 | LOT1 (SEQ ID NO: 95) | TGGGTATGTTTAAGGG (SEQ ID NO: 1650) |
| 145 | GJB2 (SEQ ID NO: 111) | GGATTTCGTCGGTATT (SEQ ID NO: 1667) |
| 146 | GJB2 (SEQ ID NO: 111) | GGGGATTTTGTTGGTA (SEQ ID NO: 1668) |
| 147 | PRDM2 (SEQ ID NO: 114) | TGTAGAGACGACGATT (SEQ ID NO: 1675) |
| 148 | PRDM2 (SEQ ID NO: 114) | ATTGTAGAGATGATGATT (SEQ ID NO: 1676) |
| 149 | PRDM2 (SEQ ID NO: 114) | AGAGCGCGGTAGTAGT (SEQ ID NO: 1677) |
| 150 | PRDM2 (SEQ ID NO: 114) | TGAGAGTGTGGTAGTA (SEQ ID NO: 1678) |
| 151 | PRDM2 (SEQ ID NO: 114) | TGTTCGCGATGTTTTA (SEQ ID NO: 1679) |
| 152 | PRDM2 (SEQ ID NO: 114) | TGTTTGTGATGTTTTAGT (SEQ ID NO: 1680) |
| 153 | ALX4 (SEQ ID NO: 64) | AAGTCGATCGTTTTGT (SEQ ID NO: 1683) |
| 154 | ALX4 (SEQ ID NO: 64) | TGGAAGTTGATTGTTTT (SEQ ID NO: 1684) |
| 155 | ALX4 (SEQ ID NO: 64) | ATATCGTTCGGGGGAA (SEQ ID NO: 2146) |
| 156 | ALX4 (SEQ ID NO: 64) | ATATCGTTCGGGGGAA (SEQ ID NO: 2146) |
| 157 | ALX4 (SEQ ID NO: 64) | TATTGCGAGGATTCGG (SEQ ID NO: 1685) |
| 158 | ALX4 (SEQ ID NO: 64) | ATTGTGAGGATTTGGT (SEQ ID NO: 1686) |
| 159 | ALX4 (SEQ ID NO: 64) | TTCGTAGCGTAGGGTT (SEQ ID NO: 1687) |
| 160 | ALX4 (SEQ ID NO: 64) | TTTGTAGTGTAGGGTTT (SEQ ID NO: 1688) |
| 161 | IGFBP7 (SEQ ID NO: 94) | ATTTTTTCGCGGGTAT (SEQ ID NO: 1710) |
| 162 | IGFBP7 (SEQ ID NO: 94) | TTTTTGTGGGTATTTTAG (SEQ ID NO: 1711) |
| 163 | IGFBP7 (SEQ ID NO: 94) | GGTATATTCGACGGGG (SEQ ID NO: 1712) |
| 164 | IGFBP7 (SEQ ID NO: 94) | GGGTATATTTGATGGGG (SEQ ID NO: 1713) |
| 165 | IGFBP7 (SEQ ID NO: 94) | GGTACGAGCGTTTTTT (SEQ ID NO: 1714) |
| 166 | IGFBP7 (SEQ ID NO: 94) | TGGGTATGAGTGTTTT (SEQ ID NO: 1715) |
| 167 | IGFBP7 (SEQ ID NO: 94) | AAAGCGTATTTAATTCGT (SEQ ID NO: 1716) |
| 168 | IGFBP7 (SEQ ID NO: 94) | AGTGTATTTAATTTGTGTT (SEQ ID NO: 1717) |
| 169 | NME1 (SEQ ID NO: 107) | AGTCGAGATTGCGTTA (SEQ ID NO: 2147) |
| 170 | NME1 (SEQ ID NO: 107) | AGTTGAGATTGTGTTAG (SEQ ID NO: 2148) |
| 171 | NME1 (SEQ ID NO: 107) | ATCGTTTGAATTCGGGA (SEQ ID NO: 2149) |
| 172 | NME1 (SEQ ID NO: 107) | ATTGTTTGAATTTGGGA (SEQ ID NO: 2150) |
| 173 | NME1 (SEQ ID NO: 107) | ATCGTTTGAATTCGGGA (SEQ ID NO: 2149) |
| 174 | NME1 (SEQ ID NO: 107) | ATTGTTTGAATTTGGGA (SEQ ID NO: 2150) |
| 175 | NME1 (SEQ ID NO: 107) | AATTCGAGATTAGTTCGG (SEQ ID NO: 1724) |
| 176 | NME1 (SEQ ID NO: 107) | AATTTGAGATTAGTTTGG (SEQ ID NO: 1725) |
| 177 | NME1 (SEQ ID NO: 107) | AATTCGAGATTAGTTCGG (SEQ ID NO: 1724) |
| 178 | NME1 (SEQ ID NO: 107) | AATTTGAGATTAGTTTGG (SEQ ID NO: 1725) |
| 179 | NME1 (SEQ ID NO: 107) | TTTTAGTACGTTGGAAA (SEQ ID NO: 2151) |
| 180 | NME1 (SEQ ID NO: 107) | TTAGTATGTTGGAAAGTA (SEQ ID NO: 2152) |
| 181 | THBS1 (SEQ ID NO: 81) | TAAAGGGGCGTTCGTA (SEQ ID NO: 1726) |
| 182 | THBS1 (SEQ ID NO: 81) | AAGGGGTGTTTGTATT (SEQ ID NO: 1727) |
| 183 | THBS1 (SEQ ID NO: 81) | GGTTAGTTCGGGCGTA (SEQ ID NO: 1728) |
| 184 | THBS1 (SEQ ID NO: 81) | GGTTAGTTTGGGTGTA (SEQ ID NO: 1729) |
| 185 | THBS1 (SEQ ID NO: 81) | GGTTAGTTCGGGCGTA (SEQ ID NO: 1728) |
| 186 | THBS1 (SEQ ID NO: 81) | GGTTAGTTTGGGTGTA (SEQ ID NO: 1729) |
| 187 | THBS1 (SEQ ID NO: 81) | TTGTGCGTTCGGAGTA (SEQ ID NO: 1730) |
| 188 | THBS1 (SEQ ID NO: 81) | TGTGTTTGGAGTAGAG (SEQ ID NO: 1731) |
| 189 | IL6 (SEQ ID NO: 99) | TTCGGTTATACGTAGG (SEQ ID NO: 1736) |
| 190 | IL6 (SEQ ID NO: 99) | TTTTGGTTATATGTAGGG (SEQ ID NO: 1737) |
| 191 | IL6 (SEQ ID NO: 99) | AGTTTAGTCGGTTTCGT (SEQ ID NO: 1738) |
| 192 | IL6 (SEQ ID NO: 99) | AGTTTAGTTGGTTTTGT (SEQ ID NO: 1739) |
| 193 | IL6 (SEQ ID NO: 99) | AGTTTAGTCGGTTTCGT (SEQ ID NO: 1738) |
| 194 | IL6 (SEQ ID NO: 99) | AGTTTAGTTGGTTTTGT (SEQ ID NO: 1739) |
| 195 | HOXA5 (SEQ ID NO: 78) | TAGTTTTCGGTCGGAA (SEQ ID NO: 1748) |
| 196 | HOXA5 (SEQ ID NO: 78) | TAGTTTTTGGTTGGAAG (SEQ ID NO: 1749) |
| 197 | HOXA5 (SEQ ID NO: 78) | ATCGGTAGTTGACGGTT (SEQ ID NO: 1752) |
| 198 | HOXA5 (SEQ ID NO: 78) | ATTGGTAGTTGATGGTT (SEQ ID NO: 1753) |
| 199 | HOXA5 (SEQ ID NO: 78) | ATCGGTAGTTGACGGTT (SEQ ID NO: 1752) |
| 200 | HOXA5 (SEQ ID NO: 78) | ATTGGTAGTTGATGGTT (SEQ ID NO: 1753) |
| 201 | GPC3 (SEQ ID NO: 118) | AATAGTCGCGTTTAGG (SEQ ID NO: 1760) |
| 202 | GPC3 (SEQ ID NO: 118) | TAGTTGTGTTTAGGGAT (SEQ ID NO: 1761) |
| 203 | CLDN7 (SEQ ID NO: 87) | TTACGTTAAGTCGGGT (SEQ ID NO: 1764) |
| 204 | CLDN7 (SEQ ID NO: 87) | AGTTATGTTAAGTTGGG (SEQ ID NO: 1765) |
| 205 | SLIT2 (SEQ ID NO: 112) | ATTTCGTCGTAGTTTG (SEQ ID NO: 1774) |
| 206 | SLIT2 (SEQ ID NO: 112) | TTTTGTTGTAGTTTGGA (SEQ ID NO: 1775) |
| 207 | SLIT2 (SEQ ID NO: 112) | TAGCGGGTTCGTAGTA (SEQ ID NO: 1776) |
| 208 | SLIT2 (SEQ ID NO: 112) | TTAGTGGGTTTGTAGTA (SEQ ID NO: 1777) |
| 209 | SLIT2 (SEQ ID NO: 112) | AAGGCGCGGAAGTTTA (SEQ ID NO: 1778) |
| 210 | SLIT2 (SEQ ID NO: 112) | AAGGTGTGGAAGTTTA (SEQ ID NO: 1779) |
| 211 | SLIT2 (SEQ ID NO: 112) | AAGGCGCGGAAGTTTA (SEQ ID NO: 1778) |
| 212 | SLIT2 (SEQ ID NO: 112) | AAGGTGTGGAAGTTTA (SEQ ID NO: 1779) |
| 213 | IGSF4 (SEQ ID NO: 74) | AGGTAGATCGAGGAGG (SEQ ID NO: 1780) |
| 214 | IGSF4 (SEQ ID NO: 74) | AGGTAGATTGAGGAGG (SEQ ID NO: 1781) |
| 215 | IGSF4 (SEQ ID NO: 74) | AGGTAGATCGAGGAGG (SEQ ID NO: 1780) |
| 216 | IGSF4 (SEQ ID NO: 74) | AGGTAGATTGAGGAGG (SEQ ID NO: 1781) |
| 217 | IGSF4 (SEQ ID NO: 74) | TAGTCGTAGAGTCGGG (SEQ ID NO: 1782) |
| 218 | IGSF4 (SEQ ID NO: 74) | GTTGTAGAGTTGGGTT (SEQ ID NO: 1783) |
| 219 | MCT1 (SEQ ID NO: 101) | AGTTAGTCGCGTTTTA (SEQ ID NO: 1788) |
| 220 | MCT1 (SEQ ID NO: 101) | AGAGTTAGTTGTGTTTTA (SEQ ID NO: 1789) |
| 221 | SEQ ID NO: 6 (SEQ ID NO: 6) | AAGTTTATCGGCGTTT (SEQ ID NO: 1792) |
| 222 | SEQ ID NO: 6 (SEQ ID NO: 6) | AGAAGTTTATTGGTGTTT (SEQ ID NO: 1793) |
| 223 | SEQ ID NO: 6 (SEQ ID NO: 6) | ATTTCGGAATTTAAGCGT (SEQ ID NO.: 1794) |
| 224 | SEQ ID NO: 6 (SEQ ID NO: 6) | TTTTGGAATTTAAGTGTT (SEQ ID NO: 1795) |
| 225 | SEQ ID NO: 6 (SEQ ID NO: 6) | TAATTTCGGACGCGGA (SEQ ID NO: 1796) |
| 226 | SEQ ID NO: 6 (SEQ ID NO: 6) | TTTTGGATGTGGAGGA (SEQ ID NO: 1797) |
| 227 | SEQ ID NO: 6 (SEQ ID NO: 6) | TTACGGTGAAGGCGGA (SEQ ID NO: 1798) |
| 228 | SEQ ID NO: 6 (SEQ ID NO: 6) | TTATGGTGAAGGTGGA (SEQ ID NO: 1799) |
| 229 | SEQ ID NO: 6 (SEQ ID NO: 6) | TTACGGTGAAGGCGGA (SEQ ID NO: 1798) |
| 230 | SEQ ID NO: 6 (SEQ ID NO: 6) | TTATGGTGAAGGTGGA (SEQ ID NO: 1799) |
| 231 | SEQ ID NO: 6 (SEQ ID NO: 6) | TTTCGGTTTTCGTTAAT (SEQ ID NO: 1800) |
| 232 | SEQ ID NO: 6 (SEQ ID NO: 6) | TTTGGTTTTTGTTAATTTAG (SEQ ID NO: |
| | | 1801) |
| 233 | SEQ ID NO: 8 (SEQ ID NO: 8) | ATAGGGCGGGATTTTA (SEQ ID NO: 2153) |
| 234 | SEQ ID NO: 8 (SEQ ID NO: 8) | GATAGGGTGGGATTTT (SEQ ID NO: 2154) |
| 235 | SEQ ID NO: 8 (SEQ ID NO: 8) | ATAAAGCGGGGTTTTA (SEQ ID NO: 1804) |
| 236 | SEQ ID NO: 8 (SEQ ID NO: 8) | GGATAAAGTGGGGTTT (SEQ ID NO: 1805) |
| 237 | SEQ ID NO: 8 (SEQ ID NO: 8) | AGGAGGCGAGAAATTT (SEQ ID NO: 1806) |
| 238 | SEQ ID NO: 8 (SEQ ID NO: 8) | GAGGAGGTGAGAAATT (SEQ ID NO: 1807) |
| 239 | SEQ ID NO: 8 (SEQ ID NO: 8) | AGAAATTTCGGGGTAG (SEQ ID NO: 1808) |
| 240 | SEQ ID NO: 8 (SEQ ID NO: 8) | GAAATTTTGGGGTAGTA (SEQ ID NO: 1809) |
| 241 | SEQ ID NO: 8 (SEQ ID NO: 8) | GGTAGTATCGTTTATAGA (SEQ ID NO: 1810) |
| 242 | SEQ ID NO: 8 (SEQ ID NO: 8) | GGGGTAGTATTGTTTATA (SEQ ID NO: 1811) |
| 243 | PROSTAGLANDIN E2 RECEPTOR, EP4 | AGTGTATCGTTTTTCGG (SEQ ID NO: 1812) |
| | SUBTYPE (PROSTANOID EP4 RECEPTOR) | |
| | (PGE RECEPTOR, EP4 SUBTYPE) (SEQ | |
| | ID NO: 10) | |
| 244 | PROSTAGLANDIN E2 RECEPTOR, EP4 | TAGTGTATTGTTTTTTGG (SEQ ID NO: 1813) |
| | SUBTYPE (PROSTANOID EP4 RECEPTOR) | |
| | (PGE RECEPTOR, EP4 SUBTYPE) (SEQ | |
| | ID NO: 10) | |
| 245 | PROSTAGLANDIN E2 RECEPTOR, EP4 | TGCGTATCGTTAGTTA (SEQ ID NO: 1814) |
| | SUBTYPE (PROSTANOID EP4 RECEPTOR) | |
| | (PGE RECEPTOR, EP4 SUBTYPE) (SEQ | |
| | ID NO: 10) | |
| 246 | PROSTAGLANDIN E2 RECEPTOR, EP4 | AGGTTGTGTATTGTTAG (SEQ ID NO: 1815) |
| | SUBTYPE (PROSTANOID EP4 RECEPTOR) | |
| | (PGE RECEPTOR, EP4 SUBTYPE) (SEQ | |
| | ID NO: 10) | |
| 247 | PROSTAGLANDIN E2 RECEPTOR, EP4 | ATTATTTCGGCGGTGA (SEQ ID NO: 1816) |
| | SUBTYPE (PROSTANOID EP4 RECEPTOR) | |
| | (PGE RECEPTOR, EP4 SUBTYPE) (SEQ | |
| | ID NO: 10) | |
| 248 | PROSTAGLANDIN E2 RECEPTOR, EP4 | GATTATTTTGGTGGTGA (SEQ ID NO: 1817) |
| | SUBTYPE (PROSTANOID EP4 RECEPTOR) | |
| | (PGE RECEPTOR, EP4 SUBTYPE) (SEQ | |
| | ID NO: 10) | |
| 249 | PROSTAGLANDIN E2 RECEPTOR, EP4 | TAAGTCGCGTAAGGAG (SEQ ID NO: 1818) |
| | SUBTYPE (PROSTANOID EP4 RECEPTOR) | |
| | (PGE RECEPTOR, EP4 SUBTYPE) (SEQ | |
| | ID NO: 10) | |
| 250 | PROSTAGLANDIN E2 RECEPTOR, EP4 | AAGTTGTGTAAGGAGTA (SEQ ID NO: 1819) |
| | SUBTYPE (PROSTANOID EP4 RECEPTOR) | |
| | (PGE RECEPTOR, EP4 SUBTYPE) (SEQ | |
| | ID NO: 10) | |
| 251 | MGC34831 (SEQ ID NO: 52) | GTCGGACGGATTTATA (SEQ ID NO: 2177) |
| 252 | MGC34831 (SEQ ID NO: 52) | TGGTTGGATGGATTTAT (SEQ ID NO: 2178) |
| 253 | SEQ ID NO: 54 (SEQ ID NO: 54) | TGTGTAGCGGCGATTA (SEQ ID NO: 1830) |
| 254 | SEQ ID NO: 54 (SEQ ID NO: 54) | GTGTGTAGTGGTGATT (SEQ ID NO: 1831) |
| 255 | ARL7 (SEQ ID NO: 30) | TAGATTTCGTAGTTTTTTA (SEQ ID NO: 1858) |
| 256 | ARL7 (SEQ ID NO: 30) | TAGATTTTGTAGTTTTTTAA (SEQ ID NO: |
| | | 1859) |
| 257 | ARL7 (SEQ ID NO: 30) | TGGGTACGTTTACGGT (SEQ ID NO: 1860) |
| 258 | ARL7 (SEQ ID NO: 30) | TGGGTATGTTTATGGTT (SEQ ID NO: 1861) |
| 259 | ARL7 (SEQ ID NO: 30) | GAAGAAATCGTTTTTGT (SEQ ID NO: 1862) |
| 260 | ARL7 (SEQ ID NO: 30) | GAAGAAATTGTTTTTGTT (SEQ ID NO: 1863) |
| 261 | ARL7 (SEQ ID NO: 30) | TAGTAGGATCGGTTTTT (SEQ ID NO: 1864) |
| 262 | ARL7 (SEQ ID NO: 30) | ATAGTAGGATTGGTTTTT (SEQ ID NO: 1865) |
| 263 | THH (SEQ ID NO: 32) | TTCGGAAGAAAAGCGAAT (SEQ ID NO: 1870) |
| 264 | THH (SEQ ID NO: 32) | TTTGGAAGAAAAGTGAAT (SEQ ID NO: 1871) |
| 265 | THH (SEQ ID NO: 32) | TTCGGAAGAAAAGCGAAT (SEQ ID NO: 1870) |
| 266 | THH (SEQ ID NO: 32) | TTTGGAAGAAAAGTGAAT (SEQ ID NO: 1871) |
| 267 | THH (SEQ ID NO: 32) | TATTCGGAAGTGATCGG (SEQ ID NO: 1874) |
| 268 | THH (SEQ ID NO: 32) | TATTTGGAAGTGATTGG (SEQ ID NO: 1875) |
| 269 | THH (SEQ ID NO: 32) | TATTCGGAAGTGATCGG (SEQ ID NO: 1874) |
| 270 | THH (SEQ ID NO: 32) | TATTTGGAAGTGATTGG (SEQ ID NO: 1875) |
| 271 | SENP3 (SEQ ID NO: 39) | TATTCGGATCGGGTTT (SEQ ID NO: 1876) |
| 272 | SENP3 (SEQ ID NO: 39) | TTTATTTGGATTGGGTT (SEQ ID NO: 1877) |
| 273 | SENP3 (SEQ ID NO: 39) | TAGTCGAAAGTAGGACGT (SEQ ID NO: 1878) |
| 274 | SENP3 (SEQ ID NO: 39) | TAGTTGAAAGTAGGATGT (SEQ ID NO: 1879) |
| 275 | SENP3 (SEQ ID NO: 39) | TAGTCGAAAGTAGGACGT (SEQ ID NO: 1878) |
| 276 | SENP3 (SEQ ID NO: 39) | TAGTTGAAAGTAGGATGT (SEQ ID NO: 1879) |
| 277 | SENP3 (SEQ ID NO: 39) | AGGACGTTTTTGATCGG (SEQ ID NO: 1880) |
| 278 | SENP3 (SEQ ID NO: 39) | AGGATGTTTTTGATTGG (SEQ ID NO: 1881) |
| 279 | SENP3 (SEQ ID NO: 39) | AGGACGTTTTTGATCGG (SEQ ID NO: 1880) |
| 280 | SENP3 (SEQ ID NO: 39) | AGGATGTTTTTGATTGG (SEQ ID NO: 1881) |
| 281 | SENP3 (SEQ ID NO: 39) | AGTTATCGTTAGGAGGG (SEQ ID NO: 1882) |
| 282 | SENP3 (SEQ ID NO: 39) | AGTTATTGTTAGGAGGG (SEQ ID NO: 1883) |
| 283 | SENP3 (SEQ ID NO: 39) | AGTTATCGTTAGGAGGG (SEQ ID NO: 1882) |
| 284 | SENP3 (SEQ ID NO: 39) | AGTTATTGTTAGGAGGG (SEQ ID NO: 1883) |
| 285 | SEQ ID NO: 42 (SEQ ID NO: 42) | AGGTCGAATAAAGCGT (SEQ ID NO: 2179) |
| 286 | SEQ ID NO: 42 (SEQ ID NO: 42) | GAGGTTGAATAAAGTGT (SEQ ID NO: 2180) |
| 287 | O60279 (SEQ ID NO: 47) | TAATTATCGGCGGTGT (SEQ ID NO: 1900) |
| 288 | O60279 (SEQ ID NO: 47) | ATTATTGGTGGTGTTTT (SEQ ID NO: 1901) |
| 289 | SEQ ID NO: 48 (SEQ ID NO: 48) | TATTTGGCGATTCGGA (SEQ ID NO: 1904) |
| 290 | SEQ ID NO: 48 (SEQ ID NO: 48) | TGGTGATTTGGAGATT (SEQ ID NO: 1905) |
| 291 | SEQ ID NO: 48 (SEQ ID NO: 48) | TAGGGTTACGTGTCGG (SEQ ID NO: 1906) |
| 292 | SEQ ID NO: 48 (SEQ ID NO: 48) | TAGGGTTATGTGTTGG (SEQ ID NO: 1907) |
| 293 | SEQ ID NO: 48 (SEQ ID NO: 48) | TAGGGTTACGTGTCGG (SEQ ID NO: 1906) |
| 294 | SEQ ID NO: 48 (SEQ ID NO: 48) | TAGGGTTATGTGTTGG (SEQ ID NO: 1907) |
| 295 | SEQ ID NO: 48 (SEQ ID NO: 48) | AACGAATTTTTCGATATT (SEQ ID NO: 1908) |
| 296 | SEQ ID NO: 48 (SEQ ID NO: 48) | TTTAATGAATTTTTTGATATT (SEQ ID NO: |
| | | 1909) |
| 297 | SEQ ID NO: 4 (SEQ ID NO: 4) | TTTTGTTCGCGTTGAA (SEQ ID NO: 1916) |
| 298 | SEQ ID NO: 4 (SEQ ID NO: 4) | TTGTTTGTGTTGAAGTA (SEQ ID NO: 1917) |
| 299 | SEQ ID NO: 5 (SEQ ID NO: 5) | AATGAGCGAGAAAGTA (SEQ ID NO: 1924) |
| 300 | SEQ ID NO: 5 (SEQ ID NO: 5) | AGAATGAGTGAGAAAGT (SEQ ID NO: 1925) |
| 301 | SEQ ID NO: 5 (SEQ ID NO: 5) | ATTAAACGGGATGGTT (SEQ ID NO: 1926) |
| 302 | SEQ ID NO: 5 (SEQ ID NO: 5) | AATATTAAATGGGATGGT (SEQ ID NO: 1927) |
| 303 | SEQ ID NO: 5 (SEQ ID NO: 5) | GAGTTGCGAGGATTTT (SEQ ID NO: 1928) |
| 304 | SEQ ID NO: 5 (SEQ ID NO: 5) | GGAGTTGTGAGGATTT (SEQ ID NO: 1929) |
| 305 | SEQ ID NO: 5 (SEQ ID NO: 5) | TATGAGGTCGTATTGG (SEQ ID NO: 2163) |
| 306 | SEQ ID NO: 5 (SEQ ID NO: 5) | TATGAGGTTGTATTGGT (SEQ ID NO: 2164) |
| 307 | SEQ ID NO: 5 (SEQ ID NO: 5) | GGGAATCGTTGATTTT (SEQ ID NO: 1930) |
| 308 | SEQ ID NO: 5 (SEQ ID NO: 5) | AGGGGAATTGTTGATT (SEQ ID NO: 1931) |
| 309 | SEQ ID NO: 1 (SEQ ID NO: 1) | GGTCGGCGTTGATTTTA (SEQ ID NO: 1942) |
| 310 | SEQ ID NO: 1 (SEQ ID NO: 1) | GGTTGGTGTTGATTTTA (SEQ ID NO: 1943) |
| 311 | SEQ ID NO: 1 (SEQ ID NO: 1) | GGTCGGCGTTGATTTTA (SEQ ID NO: 1942) |
| 312 | SEQ ID NO: 1 (SEQ ID NO: 1) | GGTTGGTGTTGATTTTA (SEQ ID NO: 1943) |
| 313 | SEQ ID NO: 1 (SEQ ID NO: 1) | GTCGGAAGTTTCGGGA (SEQ ID NO: 1948) |
| 314 | SEQ ID NO: 1 (SEQ ID NO: 1) | GTTGGAAGTTTTGGGAT (SEQ ID NO: 1949) |
| 315 | PROSTAGLANDIN E2 RECEPTOR, EP4 | AGGTAATCGAGGCGGT (SEQ ID NO: 1952) |
| | SUBTYPE (PROSTANOID EP4 RECEPTOR) | |
| | (PGE RECEPTOR, EP4 SUBTYPE) (SEQ | |
| | ID NO: 10) | |
| 316 | PROSTAGLANDIN E2 RECEPTOR, EP4 | AGGTAATTGAGGTGGT (SEQ ID NO: 1953) |
| | SUBTYPE (PROSTANOID EP4 RECEPTOR) | |
| | (PGE RECEPTOR, EP4 SUBTYPE) (SEQ | |
| | ID NO: 10) | |
| 317 | PROSTAGLANDIN E2 RECEPTOR, EP4 | AGGTAATCGAGGCGGT (SEQ ID NO: 1952) |
| | SUBTYPE (PROSTANOID EP4 RECEPTOR) | |
| | (PGE RECEPTOR, EP4 SUBTYPE) (SEQ | |
| | ID NO: 10) | |
| 318 | PROSTAGLANDIN E2 RECEPTOR, EP4 | AGGTAATTGAGGTGGT (SEQ ID NO: 1953) |
| | SUBTYPE (PROSTANOID EP4 RECEPTOR) | |
| | (PGE RECEPTOR, EP4 SUBTYPE) (SEQ | |
| | ID NO: 10) | |
| 319 | PROSTAGLANDIN E2 RECEPTOR, EP4 | GGCGTCGAAAGTCGTT (SEQ ID NO: 1954) |
| | SUBTYPE (PROSTANOID EP4 RECEPTOR) | |
| | (PGE RECEPTOR, EP4 SUBTYPE) (SEQ | |
| | ID NO: 10) | |
| 320 | PROSTAGLANDIN E2 RECEPTOR, EP4 | GGTGTTGAAAGTTGTTG (SEQ ID NO: 1955) |
| | SUBTYPE (PROSTANOID EP4 RECEPTOR) | |
| | (PGE RECEPTOR, EP4 SUBTYPE) (SEQ | |
| | ID NO: 10) | |
| 321 | PROSTAGLANDIN E2 RECEPTOR, EP4 | TAATCGTTTGTTTACGT (SEQ ID NO: 1956) |
| | SUBTYPE (PROSTANOID EP4 RECEPTOR) | |
| | (PGE RECEPTOR, EP4 SUBTYPE) (SEQ | |
| | ID NO: 10) | |
| 322 | PROSTAGLANDIN E2 RECEPTOR, EP4 | AATTGTTTGTTTATGTAGT (SEQ ID NO: 1957) |
| | SUBTYPE (PROSTANOID EP4 RECEPTOR) | |
| | (PGE RECEPTOR, EP4 SUBTYPE) (SEQ | |
| | ID NO: 10) | |
| 323 | LIM DOMAIN KINASE 1 (EC | TGTAGTCGGGAGGTTA (SEQ ID NO: 1966) |
| | 2.7.1.37) (LIMK-1) (SEQ ID NO: | |
| | 12) | |
| 324 | LIM DOMAIN KINASE 1 (EC | TGTAGTTGGGAGGTTA (SEQ ID NO: 1967) |
| | 2.7.1.37) (LIMK-1) (SEQ ID NO: | |
| | 12) | |
| 325 | LIM DOMAIN KINASE 1 (EC | TGTAGTCGGGAGGTTA (SEQ ID NO: 1966) |
| | 2.7.1.37) (LIMK-1) (SEQ ID NO: | |
| | 12) | |
| 326 | LIM DOMAIN KINASE 1 (EC | TGTAGTTGGGAGGTTA (SEQ ID NO: 1967) |
| | 2.7.1.37) (LIMK-1) (SEQ ID NO: | |
| | 12) | |
| 327 | LIM DOMAIN KINASE 1 (EC | GGATTATCGCGGGGGT (SEQ ID NO: 1968) |
| | 2.7.1.37) (LIMK-1) (SEQ ID NO: | |
| | 12) | |
| 328 | LIM DOMAIN KINASE 1 (EC | GGATTATTGTGGGGGT (SEQ ID NO: 1969) |
| | 2.7.1.37) (LIMK-1) (SEQ ID NO: | |
| | 12) | |
| 329 | LIM DOMAIN KINASE 1 (EC | GGATTATCGCGGGGGT (SEQ ID NO: 1968) |
| | 2.7.1.37) (LIMK-1) (SEQ ID NO: | |
| | 12) | |
| 330 | LIM DOMAIN KINASE 1 (EC | GGATTATTGTGGGGGT (SEQ ID NO: 1969) |
| | 2.7.1.37) (LIMK-1) (SEQ ID NO: | |
| | 12) | |
| 331 | LIM DOMAIN KINASE 1 (EC | GTCGGTAGTTTATCGGAT (SEQ ID NO: 1970) |
| | 2.7.1.37) (LIMK-1) (SEQ ID NO: | |
| | 12) | |
| 332 | LIM DOMAIN KINASE 1 (EC | GTTGGTAGTTTATTGGAT (SEQ ID NO: 1971) |
| | 2.7.1.37) (LIMK-1) (SEQ ID NO: | |
| | 12) | |
| 333 | LIM DOMAIN KINASE 1 (EC | GTCGGTAGTTTATCGGAT (SEQ ID NO: 1970) |
| | 2.7.1.37) (LIMK-1) (SEQ ID NO: | |
| | 12) | |
| 334 | LIM DOMAIN KINASE 1 (EC | GTTGGTAGTTTATTGGAT (SEQ ID NO: 1971) |
| | 2.7.1.37) (LIMK-1) (SEQ ID NO: | |
| | 12) | |
| 335 | MSF (SEQ ID NO: 13) | GTTTCGAAATTGGCGT (SEQ ID NO: 1980) |
| 336 | MSF (SEQ ID NO: 13) | TTTGAAATTGGTGTGG (SEQ ID NO: 1981) |
| 337 | MSF (SEQ ID NO: 13) | TTCGGTTTACGGGTTGTA (SEQ ID NO: 1982) |
| 338 | MSF (SEQ ID NO: 13) | TTTGGTTTATGGGTTGTA (SEQ ID NO: 1983) |
| 339 | MSF (SEQ ID NO: 13) | TTCGGTTTACGGGTTGTA (SEQ ID NO: 1982) |
| 340 | MSF (SEQ ID NO: 13) | TTTGGTTTATGGGTTGTA (SEQ ID NO: 1983) |
| 341 | MSF (SEQ ID NO: 13) | TTACGGTTCGATTTTG (SEQ ID NO: 1984) |
| 342 | MSF (SEQ ID NO: 13) | TATGGTTTGATTTTGGG (SEQ ID NO: 1985) |
| 343 | SEQ ID NO: 16 (SEQ ID NO: 16) | TTACGGATAGGGCGAT (SEQ ID NO: 1994) |
| 344 | SEQ ID NO: 16 (SEQ ID NO: 16) | TATGGATAGGGTGATTT (SEQ ID NO: 1995) |
| 345 | SEQ ID NO: 16 (SEQ ID NO: 16) | AGGCGTTGTCGGTGAT (SEQ ID NO: 1996) |
| 346 | SEQ ID NO: 16 (SEQ ID NO: 16) | AGGTGTTGTTGGTGATA (SEQ ID NO: 1997) |
| 347 | SEQ ID NO: 17 (SEQ ID NO: 17) | TACGTTTCGGGTTTGTTA (SEQ ID NO: 1998) |
| 348 | SEQ ID NO: 17 (SEQ ID NO: 17) | TATGTTTTGGGTTTGTTA (SEQ ID NO: 1999) |
| 349 | SEQ ID NO: 17 (SEQ ID NO: 17) | TACGTTTCGGGTTTGTTA (SEQ ID NO: 1998) |
| 350 | SEQ ID NO: 17 (SEQ ID NO: 17) | TATGTTTTGGGTTTGTTA (SEQ ID NO: 1999) |
| 351 | SEQ ID NO: 18 (SEQ ID NO: 18) | TTACGTCGTTATTAGGT (SEQ ID NO: 2004) |
| 352 | SEQ ID NO: 18 (SEQ ID NO: 18) | TTTTATGTTGTTATTAGGT (SEQ ID NO: 2005) |
| 353 | SEQ ID NO: 18 (SEQ ID NO: 18) | AAAGCGGAGTCGTTAG (SEQ ID NO: 2010) |
| 354 | SEQ ID NO: 18 (SEQ ID NO: 18) | AGTGGAGTTGTTAGGT (SEQ ID NO: 2011) |
| 355 | SEQ ID NO: 19 (SEQ ID NO: 19) | AGGTTTTCGTTGTAGTA (SEQ ID NO: 2012) |
| 356 | SEQ ID NO: 19 (SEQID NO: 19) | TAGGTTTTTGTTGTAGTA (SEQ ID NO: 2013) |
| 357 | SEQ ID NO: 19 (SEQ ID NO: 19) | TGAGATTCGTTTTTTAAA (SEQ ID NO: 2014) |
| 358 | SEQ ID NO: 19 (SEQID NO: 19) | GGTGAGATTTGTTTTTTA (SEQ ID NO: 2015) |
| 359 | PRDM6 (SEQ ID NO: 20) | TTGTCGGGTTACGGGA (SEQ ID NO: 2020) |
| 360 | PRDM6 (SEQ ID NO: 20) | GTTGGGTTATGGGAGA (SEQ ID NO: 2021) |
| 361 | NR2E1 (SEQ ID NO: 22) | AATGTAGCGGCGTTAT (SEQ ID NO: 2028) |
| 362 | NR2E1 (SEQ ID NO: 22) | TAAATGTAGTGGTGTTAT (SEQ ID NO: 2029) |
| 363 | NR2E1 (SEQ ID NO: 22) | GTCGTTATCGGTTTGGA (SEQ ID NO: 2030) |
| 364 | NR2E1 (SEQ ID NO: 22) | GTTGTTATTGGTTTGGA (SEQ ID NO: 2031) |
| 365 | NR2E1 (SEQ ID NO: 22) | GTCGTTATCGGTTTGGA (SEQ ID NO: 2030) |
| 366 | NR2E1 (SEQ ID NO: 22) | GTTGTTATTGGTTTGGA (SEQ ID NO: 2031) |
| 367 | NR2E1 (SEQ ID NO: 22) | GACGTAAGTTTCGGGT (SEQ ID NO: 2032) |
| 368 | NR2E1 (SEQ ID NO: 22) | GGATGTAAGTTTTGGG (SEQ ID NO: 2033) |
| 369 | NR2E1 (SEQ ID NO: 22) | TTCGGGTGATATCGTTT (SEQ ID NO: 2036) |
| 370 | NR2E1 (SEQ ID NO: 22) | TTTGGGTGATATTGTTT (SEQ ID NO: 2037) |
| 371 | NR2E1 (SEQ ID NO: 22) | TTCGGGTGATATCGTTT (SEQ ID NO: 2036) |
| 372 | NR2E1 (SEQ ID NO: 22) | TTTGGGTGATATTGTTT (SEQ ID NO: 2037) |
| 373 | NR2E1 (SEQ ID NO: 22) | AGGCGAGTCGGAGTTT (SEQ ID NO: 2038) |
| 374 | NR2E1 (SEQ ID NO: 22) | AGGTGAGTTGGAGTTTT (SEQ ID NO: 2039) |
| 375 | NR2E1 (SEQ ID NO: 22) | TAAGTCGAGCGAGTTT (SEQ ID NO: 2040) |
| 376 | NR2E1 (SEQ ID NO: 22) | TAGTAAGTTGAGTGAGT (SEQ ID NO: 2041) |
| 377 | NR2E1 (SEQ ID NO: 22) | AGGGACGCGAAAATTT (SEQ ID NO: 2042) |
| 378 | NR2E1 (SEQ ID NO: 22) | GGAGGGATGTGAAAAT (SEQ ID NO: 2043) |
| 379 | PCDH7 (SEQ ID NO: 23) | ATCGTAGTCGGTTTTA (SEQ ID NO: 2044) |
| 380 | PCDH7 (SEQ ID NO: 23) | GATTATTGTAGTTGGTTT (SEQ ID NO: 2045) |
| 381 | RTTN (SEQ ID NO: 25) | TAGTGGCGCGGTAGTT (SEQ ID NO: 2046) |
| 382 | RTTN (SEQ ID NO: 25) | TAGTGGTGTGGTAGTTT (SEQ ID NO: 2047) |
| 383 | RTTN (SEQ ID NO: 25) | TAGGACGTGTTTTCGG (SEQ ID NO: 2048) |
| 384 | RTTN (SEQ ID NO: 25) | AGGATGTGTTTTTGGG (SEQ ID NO: 2049) |
| 385 | SNAP25 (SEQ ID NO: 33) | GTTATTATTCGGTACGT (SEQ ID NO: 2169) |
| 386 | SNAP25 (SEQ ID NO: 33) | AGTTATTATTTGGTATGTAT (SEQ ID NO: |
| | | 2170) |
| 387 | SEQ ID NO: 26 (SEQ ID NO: 26) | TTAAGTATCGAGGCGT (SEQ ID NO: 2054) |
| 388 | SEQ ID NO: 26 (SEQ ID NO: 26) | TTTTAAGTATTGAGGTGT (SEQ ID NO: 2055) |
| 389 | SEQ ID NO: 26 (SEQ ID NO: 26) | AATTTTGGTCGTTTAGT (SEQ ID NO: 2056) |
| 390 | SEQ ID NO: 26 (SEQ ID NO: 26) | AAATTTTGGTTGTTTAGT (SEQ ID NO: 2057) |
| 391 | SEQ ID NO: 26 (SEQ ID NO: 26) | TTCGTATTGACGTTAAT (SEQ ID NO: 2058) |
| 392 | SEQ ID NO: 26 (SEQ ID NO: 26) | TTTGTATTGATGTTAATAGA (SEQ ID NO: |
| | | 2059) |
| 393 | SEQ ID NO: 28 (SEQ ID NO: 28) | ATTAGGCGAGTTTCGT (SEQ ID NO: 2066) |
| 394 | SEQ ID NO: 28 (SEQ ID NO: 28) | TTAGGTGAGTTTTGTTT (SEQ ID NO: 2067) |
| 395 | SEQ ID NO: 31 (SEQ ID NO: 31) | TTTACGTAGGGCGATT (SEQ ID NO: 2068) |
| 396 | SEQ ID NO: 31 (SEQ ID NO: 31) | ATTTTTATGTAGGGTGAT (SEQ ID NO: 2069) |
| 397 | SEQ ID NO: 31 (SEQ ID NO: 31) | GATACGGTTAGGCGGG (SEQ ID NO: 2070) |
| 398 | SEQ ID NO: 31 (SEQ ID NO: 31) | GATATGGTTAGGTGGG (SEQ ID NO: 2071) |
| 399 | SEQ ID NO: 31 (SEQ ID NO: 31) | GATACGGTTAGGCGGG (SEQ ID NO: 2070) |
| 400 | SEQ ID NO: 31 (SEQ ID NO: 31) | GATATGGTTAGGTGGG (SEQ ID NO: 2071) |
| 401 | SEQ ID NO: 31 (SEQ ID NO: 31) | TTCGGGCGTTTTATAT (SEQ ID NO: 2072) |
| 402 | SEQ ID NO: 31 (SEQ ID NO: 31) | GGTTTGGGTGTTTTATA (SEQ ID NO: 2073) |
| 403 | HOXB13 (SEQ ID NO: 34) | AAGTTAGCGGGTTCGT (SEQ ID NO: 2076) |
| 404 | HOXB13 (SEQ ID NO: 34) | AAGTTAGTGGGTTTGT (SEQ ID NO: 2077) |
| 405 | HOXB13 (SEQ ID NO: 34) | AAGTTAGCGGGTTCGT (SEQ ID NO: 2076) |
| 406 | HOXB13 (SEQ ID NO: 34) | AAGTTAGTGGGTTTGT (SEQ ID NO: 2077) |
| 407 | (SEQ ID NO: 35) | GGAGGTGCGAATTTAA (SEQ ID NO: 2080) |
| 408 | (SEQ ID NO: 35) | GGGAGGTGTGAATTTA (SEQ ID NO: 2081) |
| 409 | (SEQ ID NO: 35) | AAATAGTCGTTTGGGA (SEQ ID NO: 2082) |
| 410 | (SEQ ID NO: 35) | AAATAGTTGTTTGGGAG (SEQ ID NO: 2083) |
| 411 | (SEQ ID NO: 35) | AGAAAATATACGAGATTTAT (SEQ ID NO: |
| | | 2084) |
| 412 | (SEQ ID NO: 35) | AGAAAATATATGAGATTTATT (SEQ ID NO: |
| | | 2085) |
| 413 | (SEQ ID NO: 35) | TAAAGACGGGAAGAGA (SEQ ID NO: 2086) |
| 414 | (SEQ ID NO: 35) | ATAAAGATGGGAAGAGA (SEQ ID NO: 2087) |
| 415 | MGC10561 (SEQ ID NO: 37) | TTTTTTACGTTAAGGGG (SEQ ID NO: 2088) |
| 416 | MGC10561 (SEQ ID NO: 37) | TTTTTATGTTAAGGGGG (SEQ ID NO: 2089) |
| 417 | LMX1A (SEQ ID NO: 38) | GTCGGGTTTTTCGGAA (SEQ ID NO: 2092) |
| 418 | LMX1A (SEQ ID NO: 38) | GTTGGGTTTTTTGGAAG (SEQ ID NO: 2093) |
| 419 | LMX1A (SEQ ID NO: 38) | GTCGAGATTTTATCGAAA (SEQ ID NO: 2094) |
| 420 | LMX1A (SEQ ID NO: 38) | GTTGAGATTTTATTGAAAG (SEQ ID NO: 2095) |
| 421 | LMX1A (SEQ ID NO: 38) | AGTATTCGGGCGGGTA (SEQ ID NO: 2096) |
| 422 | LMX1A (SEQ ID NO: 38) | GTAGTATTTGGGTGGG (SEQ ID NO: 2097) |
| 423 | LMX1A (SEQ ID NO: 38) | AACGAAATTACGTGTAT (SEQ ID NO: 2098) |
| 424 | LMX1A (SEQ ID NO: 38) | TGAAATGAAATTATGTGTA (SEQ ID NO: 2099) |
| 425 | TITF1 (SEQ ID NO: 41) | GTCGTGGGGATCGTAT (SEQ ID NO: 2104) |
| 426 | TITF1 (SEQ ID NO: 41) | GTTGTGGGGATTGTAT (SEQ ID NO: 2105) |
| 427 | TITF1 (SEQ ID NO: 41) | GTCGTGGGGATCGTAT (SEQ ID NO: 2104) |
| 428 | TITF1 (SEQ ID NO: 41) | GTTGTGGGGATTGTAT (SEQ ID NO: 2105) |
| 429 | TITF1 (SEQ ID NO: 41) | TTAGGTCGCGTTTGTA (SEQ ID NO: 2108) |
| 430 | TITF1 (SEQ ID NO: 41) | AGGTTGTGTTTGTAGA (SEQ ID NO: 2109) |
| 431 | DDX51 (SEQ ID NO: 43) | AACGTGCGGGGTTTTT (SEQ ID NO: 2116) |
| 432 | DDX51 (SEQ ID NO: 43) | TGAATGTGTGGGGTTT (SEQ ID NO: 2117) |
| 433 | SEQ ID NO: 45 (SEQ ID NO: 45) | AGCGAACGTTTATTTT (SEQ ID NO: 2118) |
| 434 | SEQ ID NO: 45 (SEQ ID NO: 45) | TAGGAGAGTGAATGTTT (SEQ ID NO: 2119) |
| 435 | SEQ ID NO: 2 (SEQ ID NO: 2) | TAGTAGTCGGCGGGAG (SEQ ID NO: 2130) |
| 436 | SEQ ID NO: 2 (SEQ ID NO: 2) | TAGTAGTTGGTGGGAG (SEQ ID NO: 2131) |
| 437 | SEQ ID NO: 2 (SEQ ID NO: 2) | TAGTAGTCGGCGGGAG (SEQ ID NO: 2130) |
| 438 | SEQ ID NO: 2 (SEQ ID NO: 2) | TAGTAGTTGGTGGGAG (SEQ ID NO: 2131) |
| 439 | SEQ ID NO: 3 (SEQ ID NO: 3) | TTGCGTTAATTCGGTA (SEQ ID NO: 2132) |
| 440 | SEQ ID NO: 3 (SEQ ID NO: 3) | AATTTGTGTTAATTTGGT (SEQ ID NO: 2133) |
| 441 | SEQ ID NO: 3 (SEQ ID NO: 3) | AGTCGGGAGAGCGAAA (SEQ ID NO: 2134) |
| 442 | SEQ ID NO: 3 (SEQ ID NO: 3) | AGTTGGGAGAGTGAAA (SEQ ID NO: 2135) |
| 443 | SEQ ID NO: 3 (SEQ ID NO: 3) | AGTCGGGAGAGCGAAA (SEQ ID NO: 2134) |
| 444 | SEQ ID NO: 3 (SEQ ID NO: 3) | AGTTGGGAGAGTGAAA (SEQ ID NO: 2135) |
| 445 | SEQ ID NO: 3 (SEQ ID NO: 3) | GGTCGAAGAGTCGGGA (SEQ ID NO: 2136) |
| 446 | SEQ ID NO: 3 (SEQ ID NO: 3) | GGTTGAAGAGTTGGGA (SEQ ID NO: 2137) |
| 447 | SEQ ID NO: 3 (SEQ ID NO: 3) | GGTCGAAGAGTCGGGA (SEQ ID NO: 2136) |
| 448 | SEQ ID NO: 3 (SEQ ID NO: 3) | GGTTGAAGAGTTGGGA (SEQ ID NO: 2137) |
| 449 | SEQ ID NO: 3 (SEQ ID NO: 3) | ATGTTAGCGGGTCGAA (SEQ ID NO: 2138) |
| 450 | SEQ ID NO: 3 (SEQ ID NO: 3) | ATGTTAGTGGGTTGAA (SEQ ID NO: 2139) |
| 451 | SEQ ID NO: 3 (SEQ ID NO: 3) | ATGTTAGCGGGTCGAA (SEQ ID NO: 2138) |
| 452 | SEQ ID NO: 3 (SEQ ID NO: 3) | ATGTTAGTGGGTTGAA (SEQ ID NO: 2139) |

TABLE 18
Breast cancer vs. lymphocytes

| | | |
|---|---|---|
| No: | Gene | Oligo: |

| | | |
|---|---|---|
| 1 | SCGB3A1 (SEQ ID NO: 115) | TATTGGCGTCGAGGTT (SEQ ID NO: 2181) |
| 2 | SCGB3A1 (SEQ ID NO: 115) | TATTGGTGTTGAGGTT (SEQ ID NO: 2182) |
| 3 | SCGB3A1 (SEQ ID NO: 115) | TATTGGCGTCGAGGTT (SEQ ID NO: 2181) |
| 4 | SCGB3A1 (SEQ ID NO: 115) | TATTGGTGTTGAGGTT (SEQ ID NO: 2182) |
| 5 | SCGB3A1 (SEQ ID NO: 115) | GGCGTAGAAGGCGTTT (SEQ ID NO: 2140) |
| 6 | SCGB3A1 (SEQ ID NO: 115) | GGTGTAGAAGGTGTTT (SEQ ID NO: 2141) |
| 7 | SCGB3A1 (SEQ ID NO: 115) | GGCGTAGAAGGCGTTT (SEQ ID NO: 2140) |
| 8 | SCGB3A1 (SEQ ID NO: 115) | GGTGTAGAAGGTGTTT (SEQ ID NO: 2141) |
| 9 | SCGB3A1 (SEQ ID NO: 115) | TAGTGTTCGACGTTGT (SEQ ID NO: 1475) |
| 10 | SCGB3A1 (SEQ ID NO: 115) | TAGTGTTTGATGTTGTT (SEQ ID NO: 1476) |
| 11 | SASH1 (SEQ ID NO: 102) | TAGATTCGAGGTGCGG (SEQ ID NO: 1477) |
| 12 | SASH1 (SEQ ID NO: 102) | TAGATTTGAGGTGTGG (SEQ ID NO: 1478) |
| 13 | SASH1 (SEQ ID NO: 102) | TAGATTCGAGGTGCGG (SEQ ID NO: 1477) |
| 14 | SASH1 (SEQ ID NO: 102) | TAGATTTGAGGTGTGG (SEQ ID NO: 1478) |
| 15 | SASH1 (SEQ ID NO: 102) | ATTCGGTATTCGGGTAG (SEQ ID NO: 1479) |
| 16 | SASH1 (SEQ ID NO: 102) | ATTTGGTATTTGGGTAG (SEQ ID NO: 1480) |
| 17 | SASH1 (SEQ ID NO: 102) | ATTCGGTATTCGGGTAG (SEQ ID NO: 1479) |
| 18 | SASH1 (SEQ ID NO: 102) | ATTTGGTATTTGGGTAG (SEQ ID NO: 1480) |
| 19 | ARH1/NOEY2 (SEQ ID NO: 97) | TAAAACGTTCGGTAGG (SEQ ID NO: 1485) |
| 20 | ARH1/NOEY2 (SEQ ID NO: 97) | TTTAAAATGTTTGGTAGG (SEQ ID NO: 1486) |
| 21 | ARH1/NOEY2 (SEQ ID NO: 97) | TGTATTCGTCGTTAGG (SEQ ID NO: 1487) |
| 22 | ARH1/NOEY2 (SEQ ID NO: 97) | AATGTATTTGTTGTTAGG (SEQ ID NO: 1488) |
| 23 | ARH1/NOEY2 (SEQ ID NO: 97) | TTAGACGGAGTTCGGA (SEQ ID NO: 1489) |
| 24 | ARH1/NOEY2 (SEQ ID NO: 97) | TAGATGGAGTTTGGAGA (SEQ ID NO: 1490) |
| 25 | ARH1/NOEY2 (SEQ ID NO: 97) | TAGACGTAGGCGTATT (SEQ ID NO: 1491) |
| 26 | ARH1/NOEY2 (SEQ ID NO: 97) | GGGTAGATGTAGGTGT (SEQ ID NO: 1492) |
| 27 | CCND2 (SEQ ID NO: 104) | TTAGGGTCGATCGTGT (SEQ ID NO: 1493) |
| 28 | CCND2 (SEQ ID NO: 104) | TAGGGTTGATTGTGTT (SEQ ID NO: 1494) |
| 29 | CCND2 (SEQ ID NO: 104) | TTATCGTAGTCGGTTT (SEQ ID NO: 1495) |
| 30 | CCND2 (SEQ ID NO: 104) | GATTTTATTGTAGTTGGT (SEQ ID NO: 1496) |
| 31 | CCND2 (SEQ ID NO: 104) | GAGTGAGGCGCGAAAT (SEQ ID NO: 1497) |
| 32 | CCND2 (SEQ ID NO: 104) | GAGTGAGGTGTGAAAT (SEQ ID NO: 1498) |
| 33 | CCND2 (SEQ ID NO: 104) | GAGTGAGGCGCGAAAT (SEQ ID NO: 1497) |
| 34 | CCND2 (SEQ ID NO: 104) | GAGTGAGGTGTGAAAT (SEQ ID NO: 1498) |
| 35 | CDKN1A (SEQ ID NO: 67) | ATTAGGGTCGCGTTGA (SEQ ID NO: 1501) |
| 36 | CDKN1A (SEQ ID NO: 67) | ATTAGGGTTGTGTTGA (SEQ ID NO: 1502) |
| 37 | CDKN1A (SEQ ID NO: 67) | ATTAGGGTCGCGTTGA (SEQ ID NO: 1501) |
| 38 | CDKN1A (SEQ ID NO: 67) | ATTAGGGTTGTGTTGA (SEQ ID NO: 1502) |
| 39 | CDKN2A (SEQ ID NO: 57) | GGCGTTGTTTAACGTAT (SEQ ID NO: 1503) |
| 40 | CDKN2A (SEQ ID NO: 57) | GGGTGTTGTTTAATGTA (SEQ ID NO: 1504) |
| 41 | CDKN2A (SEQ ID NO: 57) | AATAGTTACGGTCGGA (SEQ ID NO: 1505) |
| 42 | CDKN2A (SEQ ID NO: 57) | AGTTATGGTTGGAGGT (SEQ ID NO: 1506) |
| 43 | CDKN2A (SEQ ID NO: 57) | GTCGGAGGTCGATTTA (SEQ ID NO: 1507) |
| 44 | CDKN2A (SEQ ID NO: 57) | GGTTGGAGGTTGATTTA (SEQ ID NO: 1508) |
| 45 | DAPK1 (SEQ ID NO: 98) | TTTCGGAGATTCGGTT (SEQ ID NO: 1509) |
| 46 | DAPK1 (SEQ ID NO: 98) | TTTGGAGATTTGGTTTT (SEQ ID NO: 1510) |
| 47 | DAPK1 (SEQ ID NO: 98) | TTTTAGCGTCGGGGAG (SEQ ID NO: 1511) |
| 48 | DAPK1 (SEQ ID NO: 98) | TTTTAGTGTTGGGGAG (SEQ ID NO: 1512) |
| 49 | DAPK1 (SEQ ID NO: 98) | TTTTAGCGTCGGGGAG (SEQ ID NO: 1511) |
| 50 | DAPK1 (SEQ ID NO: 98) | TTTTAGTGTTGGGGAG (SEQ ID NO: 1512) |
| 51 | EYA4 (SEQ ID NO: 58) | GGTATAAAATCGTAAATTTT (SEQ ID NO: |
| | | 1513) |
| 52 | EYA4 (SEQ ID NO: 58) | GGGTATAAAATTGTAAATTT (SEQ ID NO: |
| | | 1514) |
| 53 | EYA4 (SEQ ID NO: 58) | TATGTAGTCGCGTAGT (SEQ ID NO: 1515) |
| 54 | EYA4 (SEQ ID NO: 58) | TTTATGTAGTTGTGTAGT (SEQ ID NO: 1516) |
| 55 | EYA4 (SEQ ID NO: 58) | GTTTAGATACGAAATGTT (SEQ ID NO: 1517) |
| 56 | EYA4 (SEQ ID NO: 58) | GTTTAGATATGAAATGTTAT (SEQ ID NO: |
| | | 1518) |
| 57 | EYA4 (SEQ ID NO: 58) | AGTTTTGACGTCGTTT (SEQ ID NO: 1519) |
| 58 | EYA4 (SEQ ID NO: 58) | TTGATGTTGTTTTGGAA (SEQ ID NO: 1520) |
| 59 | FHIT (SEQ ID NO: 76) | TTTAAGTATCGATTTTAGT (SEQ ID NO: 2183) |
| 60 | FHIT (SEQ ID NO: 76) | TAAGTATTGATTTTAGTTTTA (SEQ ID NO: |
| | | 2184) |
| 61 | FHIT (SEQ ID NO: 76) | GTTACGTTAGCGGGTT (SEQ ID NO: 1521) |
| 62 | FHIT (SEQ ID NO: 76) | GGTTATGTTAGTGGGT (SEQ ID NO: 1522) |
| 63 | GSTP1 (SEQ ID NO: 59) | GGCGATTTCGGGGATT (SEQ ID NO: 1525) |
| 64 | GSTP1 (SEQ ID NO: 59) | GGTGATTTTGGGGATTT (SEQ ID NO: 1526) |
| 65 | GSTP1 (SEQ ID NO: 59) | GACGTTCGGGGTGTAG (SEQ ID NO: 1527) |
| 66 | GSTP1 (SEQ ID NO: 59) | GATGTTTGGGGTGTAG (SEQ ID NO: 1528) |
| 67 | GSTP1 (SEQ ID NO: 59) | GACGTTCGGGGTGTAG (SEQ ID NO: 1527) |
| 68 | GSTP1 (SEQ ID NO: 59) | GATGTTTGGGGTGTAG (SEQ ID NO: 1528) |
| 69 | GSTP1 (SEQ ID NO: 59) | AGTTCGCGGGATTTTT (SEQ ID NO: 1529) |
| 70 | GSTP1 (SEQ ID NO: 59) | GGAGTTTGTGGGATTT (SEQ ID NO: 1530) |
| 71 | GSTP1 (SEQ ID NO: 59) | AGTTTTCGTTATTAGTGA (SEQ ID NO: 1531) |
| 72 | GSTP1 (SEQ ID NO: 59) | TAGTTTTTGTTATTAGTGA (SEQ ID NO: 1532) |
| 73 | HIC1 (SEQ ID NO: 85) | TATCGAAGTTTTCGGG (SEQ ID NO: 1533) |
| 74 | HIC1 (SEQ ID NO: 85) | TATTGAAGTTTTTGGGT (SEQ ID NO: 1534) |
| 75 | HIC1 (SEQ ID NO: 85) | TAGCGGTTATTTCGGT (SEQ ID NO: 1535) |
| 76 | HIC1 (SEQ ID NO: 85) | TTTAGTGGTTATTTTGGT (SEQ ID NO: 1536) |
| 77 | HIC1 (SEQ ID NO: 85) | TACGTTTTTCGTAGCGT (SEQ ID NO: 1537) |
| 78 | HIC1 (SEQ ID NO: 85) | ATTATGTTTTTTGTAGTGT (SEQ ID NO: 1538) |
| 79 | HIC1 (SEQ ID NO: 85) | TTCGGTTTTGTCGTATA (SEQ ID NO: 1539) |
| 80 | HIC1 (SEQ ID NO: 85) | TTTGGTTTTGTTGTATAG (SEQ ID NO: 1540) |
| 81 | PGR (SEQ ID NO: 83) | TTTCGAGGTCGGATTT (SEQ ID NO: 1543) |
| 82 | PGR (SEQ ID NO: 83) | TTTGAGGTTGGATTTTT (SEQ ID NO: 1544) |
| 83 | PGR (SEQ ID NO: 83) | GTGTCGTTTAGTCGTA (SEQ ID NO: 1545) |
| 84 | PGR (SEQ ID NO: 83) | GTTGTTTAGTTGTAGGT (SEQ ID NO: 1546) |
| 85 | SERPINB5 (SEQ ID NO: 68) | TTATTAACGTGTTTGAGA (SEQ ID NO: 1549) |
| 86 | SERPINB5 (SEQ ID NO: 68) | TTATTAATGTGTTTGAGAA (SEQ ID NO: 1550) |
| 87 | SERPINB5 (SEQ ID NO: 68) | ATTGTCGTACGTATGT (SEQ ID NO: 1551) |
| 88 | SERPINB5 (SEQ ID NO: 68) | AGAGGATTGTTGTATGTA (SEQ ID NO: 1552) |
| 89 | SERPINB5 (SEQ ID NO: 68) | TTTTTTGTTCGAATATGT (SEQ ID NO: 1553) |
| 90 | SERPINB5 (SEQ ID NO: 68) | TTTGTTTGAATATGTTGG (SEQ ID NO: 1554) |
| 91 | RARB (SEQ ID NO: 88) | ATGTCGAGAACGCGAG (SEQ ID NO: 1555) |
| 92 | RARB (SEQ ID NO: 88) | GGATGTTGAGAATGTGA (SEQ ID NO: 1556) |
| 93 | RARB (SEQ ID NO: 88) | AGCGATTCGAGTAGGG (SEQ ID NO: 1557) |
| 94 | RARB (SEQ ID NO: 88) | AGTGATTTGAGTAGGG (SEQ ID NO: 1558) |
| 95 | RARB (SEQ ID NO: 88) | AGCGATTCGAGTAGGG (SEQ ID NO: 1557) |
| 96 | RARB (SEQ ID NO: 88) | AGTGATTTGAGTAGGG (SEQ ID NO: 1558) |
| 97 | RARB (SEQ ID NO: 88) | TAGGATTCGGAACGTA (SEQ ID NO: 1559) |
| 98 | RARB (SEQ ID NO: 88) | GGTAGGATTTGGAATGT (SEQ ID NO: 1560) |
| 99 | SFN (SEQ ID NO: 69) | TAGTACGGTGTCGTAT (SEQ ID NO: 1561) |
| 100 | SFN (SEQ ID NO: 69) | GTTTAGTATGGTGTTGT (SEQ ID NO: 1562) |
| 101 | SFN (SEQ ID NO: 69) | TACGTATTTCGGGTTT (SEQ ID NO: 1563) |
| 102 | SFN (SEQ ID NO: 69) | TATTTATGTATTTTGGGTT (SEQ ID NO: 1564) |
| 103 | SFN (SEQ ID NO: 69) | TTCGTTTTTCGTAGGAG (SEQ ID NO: 1565) |
| 104 | SFN (SEQ ID NO: 69) | TTTGTTTTTTGTAGGAGA (SEQ ID NO: 1566) |
| 105 | SFN (SEQ ID NO: 69) | TTTATAGCGTTCGGTT (SEQ ID NO: 2185) |
| 106 | SFN (SEQ ID NO: 69) | ATAGTGTTTGGTTTGTT (SEQ ID NO: 2186) |
| 107 | TERT (SEQ ID NO: 92) | AGGTGTACGGTTTCGT (SEQ ID NO: 2187) |
| 108 | TERT (SEQ ID NO: 92) | AGGTGTATGGTTTTGT (SEQ ID NO: 2188) |
| 109 | TERT (SEQ ID NO: 92) | AGGTGTACGGTTTCGT (SEQ ID NO: 2187) |
| 110 | TERT (SEQ ID NO: 92) | AGGTGTATGGTTTTGT (SEQ ID NO: 2188) |
| 111 | TERT (SEQ ID NO: 92) | TATAACGAACGTCGTT (SEQ ID NO: 2142) |
| 112 | TERT (SEQ ID NO: 92) | AGGTATAATGAATGTTGT (SEQ ID NO: 2143) |
| 113 | TGFBR2 (SEQ ID NO: 93) | ATGGGGCGGACGAATA (SEQ ID NO: 1567) |
| 114 | TGFBR2 (SEQ ID NO: 93) | ATGGGGTGGATGAATA (SEQ ID NO: 1568) |
| 115 | TGFBR2 (SEQ ID NO: 93) | ATGGGGCGGACGAATA (SEQ ID NO: 1567) |
| 116 | TGFBR2 (SEQ ID NO: 93) | ATGGGGTGGATGAATA (SEQ ID NO: 1568) |
| 117 | THRB (SEQ ID NO: 106) | GGGCGGTTAAGTCGAG (SEQ ID NO: 1569) |
| 118 | THRB (SEQ ID NO: 106) | GGGTGGTTAAGTTGAG (SEQ ID NO: 1570) |
| 119 | THRB (SEQ ID NO: 106) | GGGCGGTTAAGTCGAG (SEQ ID NO: 1569) |
| 120 | THRB (SEQ ID NO: 106) | GGGTGGTTAAGTTGAG (SEQ ID NO: 1570) |
| 121 | TIMP3 (SEQ ID NO: 103) | TTATTAACGGAGGAAGG (SEQ ID NO: 1571) |
| 122 | TIMP3 (SEQ ID NO: 103) | TATTAATGGAGGAAGGG (SEQ ID NO: 1572) |
| 123 | CDH13 (SEQ ID NO: 70) | TAAAACGAGGGAGCGT (SEQ ID NO: 1583) |
| 124 | CDH13 (SEQ ID NO: 70) | AAAATGAGGGAGTGTT (SEQ ID NO: 1584) |
| 125 | CDH13 (SEQ ID NO: 70) | TAGTCGCGTGTATGAA (SEQ ID NO: 1585) |
| 126 | CDH13 (SEQ ID NO: 70) | TGTAGTTGTGTGTATGA (SEQ ID NO: 1586) |
| 127 | CDH13 (SEQ ID NO: 70) | ATGAAAACGTCGTCGG (SEQ ID NO: 1587) |
| 128 | CDH13 (SEQ ID NO: 70) | AATGAAAATGTTGTTGG (SEQ ID NO: 1588) |
| 129 | CDH13 (SEQ ID NO: 70) | TAGTCGAGAATTTCGT (SEQ ID NO: 1589) |
| 130 | CDH13 (SEQ ID NO: 70) | TGTAGTTGAGAATTTTGT (SEQ ID NO: 1590) |
| 131 | TMS1/ASC (SEQ ID NO: 84) | TTCGTTTCGGAGTCGA (SEQ ID NO: 1591) |
| 132 | TMS1/ASC (SEQ ID NO: 84) | TTTGTTTTGGAGTTGAT (SEQ ID NO: 1592) |
| 133 | APAF1 (SEQ ID NO: 82) | GTGTCGTAGCGGTATT (SEQ ID NO: 1593) |
| 134 | APAF1 (SEQ ID NO: 82) | GGTGTTGTAGTGGTAT (SEQ ID NO: 1594) |
| 135 | APAF1 (SEQ ID NO: 82) | AGTAGCGTCGGGTTTT (SEQ ID NO: 1595) |
| 136 | APAF1 (SEQ ID NO: 82) | GAGTAGTGTTGGGTTT (SEQ ID NO: 1596) |
| 137 | SYK (SEQ ID NO: 60) | GATCGATGCGGTTTAT (SEQ ID NO: 1599) |
| 138 | SYK (SEQ ID NO: 60) | GGGATTGATGTGGTTT (SEQ ID NO: 1600) |
| 139 | SYK (SEQ ID NO: 60) | TTATTCGGTCGGGATT (SEQ ID NO: 1603) |
| 140 | SYK (SEQ ID NO: 60) | TTTATTTGGTTGGGATT (SEQ ID NO: 1604) |
| 141 | FABP3 (SEQ ID NO: 77) | GTGATGCGAGGGTTAT (SEQ ID NO: 1607) |
| 142 | FABP3 (SEQ ID NO: 77) | GTGATGTGAGGGTTAT (SEQ ID NO: 1608) |
| 143 | FABP3 (SEQ ID NO: 77) | GTGATGCGAGGGTTAT (SEQ ID NO: 1607) |
| 144 | FABP3 (SEQ ID NO: 77) | GTGATGTGAGGGTTAT (SEQ ID NO: 1608) |
| 145 | FABP3 (SEQ ID NO: 77) | TAAAGCGGTAGTTCGG (SEQ ID NO: 1609) |
| 146 | FABP3 (SEQ ID NO: 77) | AAGTGGTAGTTTGGGT (SEQ ID NO: 1610) |
| 147 | FABP3 (SEQ ID NO: 77) | TATTGGCGTTGACGTA (SEQ ID NO: 1611) |
| 148 | FABP3 (SEQ ID NO: 77) | TGGTGTTGATGTAGGT (SEQ ID NO: 1612) |
| 149 | RASSF1A (SEQ ID NO: 90) | TACGGGTATTTTCGCGT (SEQ ID NO: 1613) |
| 150 | RASSF1A (SEQ ID NO: 90) | ATATGGGTATTTTTGTGT (SEQ ID NO: 1614) |
| 151 | RASSF1A (SEQ ID NO: 90) | AGAGCGCGTTTAGTTT (SEQ ID NO: 1615) |
| 152 | RASSF1A (SEQ ID NO: 90) | GAGAGTGTGTTTAGTTT (SEQ ID NO: 1616) |
| 153 | RASSF1A (SEQ ID NO: 90) | AGTAAATCGGATTAGGA (SEQ ID NO: 1617) |
| 154 | RASSF1A (SEQ ID NO: 90) | AGTAAATTGGATTAGGAG (SEQ ID NO: 1618) |
| 155 | TWIST (SEQ ID NO: 100) | AGTAAAGGCGTTGCGT (SEQ ID NO: 1619) |
| 156 | TWIST (SEQ ID NO: 100) | AGTAAAGGTGTTGTGT (SEQ ID NO: 1620) |
| 157 | TWIST (SEQ ID NO: 100) | AGTAAAGGCGTTGCGT (SEQ ID NO: 1619) |
| 158 | TWIST (SEQ ID NO: 100) | AGTAAAGGTGTTGTGT (SEQ ID NO: 1620) |
| 159 | TWIST (SEQ ID NO: 100) | TATTTTTCGAGGCGTA (SEQ ID NO: 1621) |
| 160 | TWIST (SEQ ID NO: 100) | TTTTGAGGTGTAGTTTT (SEQ ID NO: 1622) |
| 161 | TWIST (SEQ ID NO: 100) | ATTGGGTCGTTGTAGA (SEQ ID NO: 1623) |
| 162 | TWIST (SEQ ID NO: 100) | ATTGGGTTGTTGTAGA (SEQ ID NO: 1624) |
| 163 | TWIST (SEQ ID NO: 100) | ATTGGGTCGTTGTAGA (SEQ ID NO: 1623) |
| 164 | TWIST (SEQ ID NO: 100) | ATTGGGTTGTTGTAGA (SEQ ID NO: 1624) |
| 165 | TWIST (SEQ ID NO: 100) | TAGGTCGGGACGTAAA (SEQ ID NO: 1625) |
| 166 | TWIST (SEQ ID NO: 100) | AGTAGGTTGGGATGTA (SEQ ID NO: 1626) |
| 167 | ESR2 (SEQ ID NO: 91) | TTTACGTGATCGAGTT (SEQ ID NO: 1631) |
| 168 | ESR2 (SEQ ID NO: 91) | AGTTTATGTGATTGAGTT (SEQ ID NO: 1632) |
| 169 | PLAU (SEQ ID NO: 62) | TATTTGTCGCGTTGAT (SEQ ID NO: 1633) |
| 170 | PLAU (SEQ ID NO: 62) | ATTTGTTGTGTTGATGA (SEQ ID NO: 1634) |
| 171 | PLAU (SEQ ID NO: 62) | TGTAATTCGGGGATTT (SEQ ID NO: 1635) |
| 172 | PLAU (SEQ ID NO: 62) | TTGTAATTTGGGGATTT (SEQ ID NO: 1636) |
| 173 | PLAU (SEQ ID NO: 62) | TTGGAGATCGCGTTTT (SEQ ID NO: 1637) |
| 174 | PLAU (SEQ ID NO: 62) | TTGGAGATTGTGTTTTT (SEQ ID NO: 1638) |
| 175 | PLAU (SEQ ID NO: 62) | GAGCGTTGCGGAAGTA (SEQ ID NO: 1639) |
| 176 | PLAU (SEQ ID NO: 62) | GAGTGTTGTGGAAGTA (SEQ ID NO: 1640) |
| 177 | PLAU (SEQ ID NO: 62) | GAGCGTTGCGGAAGTA (SEQ ID NO: 1639) |
| 178 | PLAU (SEQ ID NO: 62) | GAGTGTTGTGGAAGTA (SEQ ID NO: 1640) |
| 179 | STAT1 (SEQ ID NO: 109) | ATATGATTTCGGAATTTTA (SEQ ID NO: 2189) |
| 180 | STAT1 (SEQ ID NO: 109) | ATATGATTTTGGAATTTTAA (SEQ ID NO: |
| | | 2190) |
| 181 | BRCA1 (SEQ ID NO: 66) | TTTCGTGGTAACGGAA (SEQ ID NO: 1645) |
| 182 | BRCA1 (SEQ ID NO: 66) | TTTGTGGTAATGGAAAA (SEQ ID NO: 1646) |
| 183 | LOT1 (SEQ ID NO: 95) | ATGGGTACGTTTAAGG (SEQ ID NO: 1649) |
| 184 | LOT1 (SEQ ID NO: 95) | TGGGTATGTTTAAGGG (SEQ ID NO: 1650) |
| 185 | LOT1 (SEQ ID NO: 95) | AAATTAGTTACGTTATTTAA (SEQ ID NO: |
| | | 1651) |
| 186 | LOT1 (SEQ ID NO: 95) | TGAAATTAGTTATGTTATTTA (SEQ ID NO: |
| | | 1652) |
| 187 | LOT1 (SEQ ID NO: 95) | ATGTCGGTTATTACGT (SEQ ID NO: 1653) |
| 188 | LOT1 (SEQ ID NO: 95) | TGTTGGTTATTATGTAGA (SEQ ID NO: 1654) |
| 189 | PRSS8 (SEQ ID NO: 72) | AGTTGGCGGAGTTTAG (SEQ ID NO: 1655) |
| 190 | PRSS8 (SEQ ID NO: 72) | AGTTGGTGGAGTTTAG (SEQ ID NO: 1656) |
| 191 | PRSS8 (SEQ ID NO: 72) | AGTTGGCGGAGTTTAG (SEQ ID NO: 1655) |
| 192 | PRSS8 (SEQ ID NO: 72) | AGTTGGTGGAGTTTAG (SEQ ID NO: 1656) |
| 193 | PRSS8 (SEQ ID NO: 72) | TTGGTGATTCGTTTATAT (SEQ ID NO: 1657) |
| 194 | PRSS8 (SEQ ID NO: 72) | GTTGGTGATTTGTTTATA (SEQ ID NO: 1658) |
| 195 | PRSS8 (SEQ ID NO: 72) | TGTTCGTTTCGGATAT (SEQ ID NO: 1659) |
| 196 | PRSS8 (SEQ ID NO: 72) | TTTGTTTTGGATATTTTAG (SEQ ID NO: 1660) |
| 197 | SLC19A1 (SEQ ID NO: 116) | GTCGTGCGGTTTTTAA (SEQ ID NO: 1663) |
| 198 | SLC19A1 (SEQ ID NO: 116) | GGTTGTGTGGTTTTTAA (SEQ ID NO: 1664) |
| 199 | SLC19A1 (SEQ ID NO: 116) | TTACGAAGGCGGTTTA (SEQ ID NO: 1665) |
| 200 | SLC19A1 (SEQ ID NO: 116) | TTTTATGAAGGTGGTTT (SEQ ID NO: 1666) |
| 201 | GJB2 (SEQ ID NO: 111) | GGATTTCGTCGGTATT (SEQ ID NO: 1667) |
| 202 | GJB2 (SEQ ID NO: 111) | GGGGATTTTGTTGGTA (SEQ ID NO: 1668) |
| 203 | HS3ST2 (SEQ ID NO: 113) | GAATCGGAGAGGCGAG (SEQ ID NO: 1671) |
| 204 | HS3ST2 (SEQ ID NO: 113) | AATTGGAGAGGTGAGG (SEQ ID NO: 1672) |
| 205 | HS3ST2 (SEQ ID NO: 113) | GGGTAATCGTTTGGTA (SEQ ID NO: 1673) |
| 206 | HS3ST2 (SEQ ID NO: 113) | GGGTAATTGTTTGGTAT (SEQ ID NO: 1674) |
| 207 | PRDM2 (SEQ ID NO: 114) | TGTAGAGACGACGATT (SEQ ID NO: 1675) |
| 208 | PRDM2 (SEQ ID NO: 114) | ATTGTAGAGATGATGATT (SEQ ID NO: 1676) |
| 209 | PRDM2 (SEQ ID NO: 114) | AGAGCGCGGTAGTAGT (SEQ ID NO: 1677) |
| 210 | PRDM2 (SEQ ID NO: 114) | TGAGAGTGTGGTAGTA (SEQ ID NO: 1678) |
| 211 | PRDM2 (SEQ ID NO: 114) | TGTTCGCGATGTTTTA (SEQ ID NO: 1679) |
| 212 | PRDM2 (SEQ ID NO: 114) | TGTTTGTGATGTTTTAGT (SEQ ID NO: 1680) |
| 213 | PRDM2 (SEQ ID NO: 114) | AGTATATAAACGTAGATTTT (SEQ ID NO: |
| | | 1681) |
| 214 | PRDM2 (SEQ ID NO: 114) | AAGTATATAAATGTAGATTTT (SEQ ID NO: |
| | | 1682) |
| 215 | ALX4 (SEQ ID NO: 64) | AAGTCGATCGTTTTGT (SEQ ID NO: 1683) |
| 216 | ALX4 (SEQ ID NO: 64) | TGGAAGTTGATTGTTTT (SEQ ID NO: 1684) |
| 217 | ALX4 (SEQ ID NO: 64) | TATTGCGAGGATTCGG (SEQ ID NO: 1685) |
| 218 | ALX4 (SEQ ID NO: 64) | ATTGTGAGGATTTGGT (SEQ ID NO: 1686) |
| 219 | ALX4 (SEQ ID NO: 64) | TTCGTAGCGTAGGGTT (SEQ ID NO: 1687) |
| 220 | ALX4 (SEQ ID NO: 64) | TTTGTAGTGTAGGGTTT (SEQ ID NO: 1688) |
| 221 | S100A7 (SEQ ID NO: 96) | TATAGTCGGGGTGATA (SEQ ID NO: 1689) |
| 222 | S100A7 (SEQ ID NO: 96) | TTTATAGTTGGGGTGAT (SEQ ID NO: 1690) |
| 223 | S100A7 (SEQ ID NO: 96) | AGTCGGGCGTTAGTAA (SEQ ID NO: 1691) |
| 224 | S100A7 (SEQ ID NO: 96) | GAGTTGGGTGTTAGTA (SEQ ID NO: 1692) |
| 225 | S100A7 (SEQ ID NO: 96) | GGATGGCGGAAGTTTA (SEQ ID NO: 1693) |
| 226 | S100A7 (SEQ ID NO: 96) | GGATGGTGGAAGTTTA (SEQ ID NO: 1694) |
| 227 | S100A7 (SEQ ID NO: 96) | GGATGGCGGAAGTTTA (SEQ ID NO: 1693) |
| 228 | S100A7 (SEQ ID NO: 96) | GGATGGTGGAAGTTTA (SEQ ID NO: 1694) |
| 229 | APC (SEQ ID NO: 65) | GATTCGTATTTCGTAGT (SEQ ID NO: 1695) |
| 230 | APC (SEQ ID NO: 65) | GATTCGTATTTCGTAGT (SEQ ID NO: 1695) |
| 231 | APC (SEQ ID NO: 65) | AGCGTTTTGGTTCGTAT (SEQ ID NO: 1696) |
| 232 | APC (SEQ ID NO: 65) | AGTGTTTTGGTTTGTAT (SEQ ID NO: 1697) |
| 233 | APC (SEQ ID NO: 65) | AGCGTTTTGGTTCGTAT (SEQ ID NO: 1696) |
| 234 | APC (SEQ ID NO: 65) | AGTGTTTTGGTTTGTAT (SEQ ID NO: 1697) |
| 235 | APC (SEQ ID NO: 65) | TTAATCGGCGGGTTTT (SEQ ID NO: 1698) |
| 236 | APC (SEQ ID NO: 65) | AGTTAATTGGTGGGTT (SEQ ID NO: 1699) |
| 237 | CDH1 (SEQ ID NO: 79) | AGGTATCGTTTTTCGT (SEQ ID NO: 2191) |
| 238 | CDH1 (SEQ ID NO: 79) | GAGGTATTGTTTTTTGTA (SEQ ID NO: 2192) |
| 239 | SEQ ID NO: 2 (SEQ ID NO: 2) | TAGGGGTTCGATTAGG (SEQ ID NO: 2193) |
| 240 | SEQ ID NO: 2 (SEQ ID NO: 2) | AGGGGTTTGATTAGGG (SEQ ID NO: 2194) |
| 241 | SEQ ID NO: 2 (SEQ ID NO: 2) | TAGGTATACGAAAGAGTA (SEQ ID NO: 1704) |
| 242 | SEQ ID NO: 2 (SEQ ID NO: 2) | TTAGGTATATGAAAGAGTA (SEQ ID NO: 1705) |
| 243 | IGFBP7 (SEQ ID NO: 94) | TAGTCGCGGAATGTTA (SEQ ID NO: 1708) |
| 244 | IGFBP7 (SEQ ID NO: 94) | TTGGTAGTTGTGGAAT (SEQ ID NO: 1709) |
| 245 | IGFBP7 (SEQ ID NO: 94) | ATTTTTTCGCGGGTAT (SEQ ID NO: 1710) |
| 246 | IGFBP7 (SEQ ID NO: 94) | TTTTTGTGGGTATTTTAG (SEQ ID NO: 1711) |
| 247 | IGFBP7 (SEQ ID NO: 94) | GGTATATTCGACGGGG (SEQ ID NO: 1712) |
| 248 | IGFBP7 (SEQ ID NO: 94) | GGGTATATTTGATGGGG (SEQ ID NO: 1713) |
| 249 | IGFBP7 (SEQ ID NO: 94) | GGTACGAGCGTTTTTT (SEQ ID NO: 1714) |
| 250 | IGFBP7 (SEQ ID NO: 94) | TGGGTATGAGTGTTTT (SEQ ID NO: 1715) |
| 251 | IGFBP7 (SEQ ID NO: 94) | AAAGCGTATTTAATTCGT (SEQ ID NO: 1716) |
| 252 | IGFBP7 (SEQ ID NO: 94) | AGTGTATTTAATTTGTGTT (SEQ ID NO: 1717) |
| 253 | SOD2 (SEQ ID NO: 105) | GTCGTTTAGTCGGTTTA (SEQ ID NO: 1718) |
| 254 | SOD2 (SEQ ID NO: 105) | GTTGTTTAGTTGGTTTAT (SEQ ID NO: 1719) |
| 255 | SOD2 (SEQ ID NO: 105) | TATTAGGCGGTTGCGG (SEQ ID NO: 1720) |
| 256 | SOD2 (SEQ ID NO: 105) | TATTAGGTGGTTGTGG (SEQ ID NO: 1721) |
| 257 | SOD2 (SEQ ID NO: 105) | TATTAGGCGGTTGCGG (SEQ ID NO: 1720) |
| 258 | SOD2 (SEQ ID NO: 105) | TATTAGGTGGTTGTGG (SEQ ID NO: 1721) |
| 259 | NME1 (SEQ ID NO: 107) | AGTCGAGATTGCGTTA (SEQ ID NO: 2147) |
| 260 | NME1 (SEQ ID NO: 107) | AGTTGAGATTGTGTTAG (SEQ ID NO: 2148) |
| 261 | NME1 (SEQ ID NO: 107) | ATCGTTTGAATTCGGGA (SEQ ID NO: 2149) |
| 262 | NME1 (SEQ ID NO: 107) | ATTGTTTGAATTTGGGA (SEQ ID NO: 2150) |
| 263 | NME1 (SEQ ID NO: 107) | ATCGTTTGAATTCGGGA (SEQ ID NO: 2149) |
| 264 | NME1 (SEQ ID NO: 107) | ATTGTTTGAATTTGGGA (SEQ ID NO: 2150) |
| 265 | NME1 (SEQ ID NO: 107) | AATTCGAGATTAGTTCGG (SEQ ID NO: 1724) |
| 266 | NME1 (SEQ ID NO: 107) | AATTTGAGATTAGTTTGG (SEQ ID NO: 1725) |
| 267 | NME1 (SEQ ID NO: 107) | AATTCGAGATTAGTTCGG (SEQ ID NO: 1724) |
| 268 | NME1 (SEQ ID NO: 107) | AATTTGAGATTAGTTTGG (SEQ ID NO: 1725) |
| 269 | NME1 (SEQ ID NO: 107) | TTTTAGTACGTTGGAAA (SEQ ID NO: 2151) |
| 270 | NME1 (SEQ ID NO: 107) | TTAGTATGTTGGAAAGTA (SEQ ID NO: 2152) |
| 271 | THBS1 (SEQ ID NO: 81) | TAAAGGGGCGTTCGTA (SEQ ID NO: 1726) |
| 272 | THBS1 (SEQ ID NO: 81) | AAGGGGTGTTTGTATT (SEQ ID NO: 1727) |
| 273 | THBS1 (SEQ ID NO: 81) | GGTTAGTTCGGGCGTA (SEQ ID NO: 1728) |
| 274 | THBS1 (SEQ ID NO: 81) | GGTTAGTTTGGGTGTA (SEQ ID NO: 1729) |
| 275 | THBS1 (SEQ ID NO: 81) | GGTTAGTTCGGGCGTA (SEQ ID NO: 1728) |
| 276 | THBS1 (SEQ ID NO: 81) | GGTTAGTTTGGGTGTA (SEQ ID NO: 1729) |
| 277 | THBS1 (SEQ ID NO: 81) | TTGTGCGTTCGGAGTA (SEQ ID NO: 1730) |
| 278 | THBS1 (SEQ ID NO: 81) | TGTGTTTGGAGTAGAG (SEQ ID NO: 1731) |
| 279 | ESR1 (SEQ ID NO: 75) | AAATCGGCGGGTTATT (SEQ ID NO: 1732) |
| 280 | ESR1 (SEQ ID NO: 75) | AGAAATTGGTGGGTTA (SEQ ID NO: 1733) |
| 281 | ESR1 (SEQ ID NO: 75) | AGATCGTGTTTTCGTA (SEQ ID NO: 2195) |
| 282 | ESR1 (SEQ ID NO: 75) | ATTGTGTTTTTGTAGGG (SEQ ID NO: 2196) |
| 283 | IL6 (SEQ ID NO: 99) | AGATGTCGTCGAGGAT (SEQ ID NO: 2197) |
| 284 | IL6 (SEQ ID NO: 99) | ATGTTGTTGAGGATGTA (SEQ ID NO: 2198) |
| 285 | IL6 (SEQ ID NO: 99) | AGTTTAGTCGGTTTCGT (SEQ ID NO: 1738) |
| 286 | IL6 (SEQ ID NO: 99) | AGTTTAGTTGGTTTTGT (SEQ ID NO: 1739) |
| 287 | IL6 (SEQ ID NO: 99) | AGTTTAGTCGGTTTCGT (SEQ ID NO: 1738) |
| 288 | IL6 (SEQ ID NO: 99) | AGTTTAGTTGGTTTTGT (SEQ ID NO: 1739) |
| 289 | CASP8 (SEQ ID NO: 71) | ATTTTTTAAACGGGTTTA (SEQ ID NO: 1742) |
| 290 | CASP8 (SEQ ID NO: 71) | TTTTAAATGGGTTTATAGG (SEQ ID NO: 1743) |
| 291 | HOXA5 (SEQ ID NO: 78) | TTCGAGTTCGGTTGAA (SEQ ID NO: 1746) |
| 292 | HOXA5 (SEQ ID NO: 78) | GTTTGAGTTTGGTTGAA (SEQ ID NO: 1747) |
| 293 | HOXA5 (SEQ ID NO: 78) | TAATTCGATTTCGGTTT (SEQ ID NO: 1750) |
| 294 | HOXA5 (SEQ ID NO: 78) | TTTAATTTGATTTTGGTTT (SEQ ID NO: 1751) |
| 295 | SNCG (SEQ ID NO: 73) | TGCGGTAGTATTCGAGT (SEQ ID NO: 1758) |
| 296 | SNCG (SEQ ID NO: 73) | TGTGGTAGTATTTGAGT (SEQ ID NO: 1759) |
| 297 | SNCG (SEQ ID NO: 73) | TGCGGTAGTATTCGAGT (SEQ ID NO: 1758) |
| 298 | SNCG (SEQ ID NO: 73) | TGTGGTAGTATTTGAGT (SEQ ID NO: 1759) |
| 299 | SNCG (SEQ ID NO: 73) | TATCGGGGATAGTCGTT (SEQ ID NO: 2199) |
| 300 | SNCG (SEQ ID NO: 73) | TATTGGGGATAGTTGTT (SEQ ID NO: 2200) |
| 301 | SNCG (SEQ ID NO: 73) | TATCGGGGATAGTCGTT (SEQ ID NO: 2199) |
| 302 | SNCG (SEQ ID NO: 73) | TATTGGGGATAGTTGTT (SEQ ID NO: 2200) |
| 303 | SNCG (SEQ ID NO: 73) | TATCGGCGTTAATAGG (SEQ ID NO: 2201) |
| 304 | SNCG (SEQ ID NO: 73) | TATTGGTGTTAATAGGAG (SEQ ID NO: 2202) |
| 305 | SNCG (SEQ ID NO: 73) | ATTGTACGTAGGGTTG (SEQ ID NO: 2203) |
| 306 | SNCG (SEQ ID NO: 73) | TTTTATTGTATGTAGGGT (SEQ ID NO: 2204) |
| 307 | GPC3 (SEQ ID NO: 118) | AATAGTCGCGTTTAGG (SEQ ID NO: 1760) |
| 308 | GPC3 (SEQ ID NO: 118) | TAGTTGTGTTTAGGGAT (SEQ ID NO: 1761) |
| 309 | GPC3 (SEQ ID NO: 118) | TTTAACGTAGTTTTGATCGG (SEQ ID NO: |
| | | 1762) |
| 310 | GPC3 (SEQ ID NO: 118) | TTTAATGTAGTTTTGATTGG (SEQ ID NO: |
| | | 1763) |
| 311 | GPC3 (SEQ ID NO: 118) | TTTAACGTAGTTTTGATCGG (SEQ ID NO: |
| | | 1762) |
| 312 | GPC3 (SEQ ID NO: 118) | TTTAATGTAGTTTTGATTGG (SEQ ID NO: |
| | | 1763) |
| 313 | CLDN7 (SEQ ID NO: 87) | TTACGTTAAGTCGGGT (SEQ ID NO: 1764) |
| 314 | CLDN7 (SEQ ID NO: 87) | AGTTATGTTAAGTTGGG (SEQ ID NO: 1765) |
| 315 | CLDN7 (SEQ ID NO: 87) | TAGCGTTTTAGGCGTA (SEQ ID NO: 1766) |
| 316 | CLDN7 (SEQ ID NO: 87) | TAGTGTTTTAGGTGTATT (SEQ ID NO: 1767) |
| 317 | CLDN7 (SEQ ID NO: 87) | TTAGGGGCGTTTCGTA (SEQ ID NO: 1768) |
| 318 | CLDN7 (SEQ ID NO: 87) | TTAGGGGTGTTTTGTAG (SEQ ID NO: 1769) |
| 319 | CLDN7 (SEQ ID NO: 87) | TAGAATTCGGCGGGGA (SEQ ID NO: 1770) |
| 320 | CLDN7 (SEQ ID NO: 87) | TAGAATTTGGTGGGGA (SEQ ID NO: 1771) |
| 321 | CLDN7 (SEQ ID NO: 87) | TAGAATTCGGCGGGGA (SEQ ID NO: 1770) |
| 322 | CLDN7 (SEQ ID NO: 87) | TAGAATTTGGTGGGGA (SEQ ID NO: 1771) |
| 323 | SLIT2 (SEQ ID NO: 112) | TTCGATAGTTAACGATG (SEQ ID NO: 1772) |
| 324 | SLIT2 (SEQ ID NO: 112) | TTTGATAGTTAATGATGGT (SEQ ID NO: 1773) |
| 325 | SLIT2 (SEQ ID NO: 112) | ATTTCGTCGTAGTTTG (SEQ ID NO: 1774) |
| 326 | SLIT2 (SEQ ID NO: 112) | TTTTGTTGTAGTTTGGA (SEQ ID NO: 1775) |
| 327 | SLIT2 (SEQ ID NO: 112) | TAGCGGGTTCGTAGTA (SEQ ID NO: 1776) |
| 328 | SLIT2 (SEQ ID NO: 112) | TTAGTGGGTTTGTAGTA (SEQ ID NO: 1777) |
| 329 | SLIT2 (SEQ ID NO: 112) | AAGGCGCGGAAGTTTA (SEQ ID NO: 1778) |
| 330 | SLIT2 (SEQ ID NO: 112) | AAGGTGTGGAAGTTTA (SEQ ID NO: 1779) |
| 331 | SLIT2 (SEQ ID NO: 112) | AAGGCGCGGAAGTTTA (SEQ ID NO: 1778) |
| 332 | SLIT2 (SEQ ID NO: 112) | AAGGTGTGGAAGTTTA (SEQ ID NO: 1779) |
| 333 | IGSF4 (SEQ ID NO: 74) | TAGTCGTAGAGTCGGG (SEQ ID NO: 1782) |
| 334 | IGSF4 (SEQ ID NO: 74) | GTTGTAGAGTTGGGTT (SEQ ID NO: 1783) |
| 335 | IGSF4 (SEQ ID NO: 74) | TAGGTTTTCGGATTGA (SEQ ID NO: 1784) |
| 336 | IGSF4 (SEQ ID NO: 74) | GTAGGTTTTTGGATTGA (SEQ ID NO: 1785) |
| 337 | MCT1 (SEQ ID NO: 101) | ATTTTACGTAGGCGTT (SEQ ID NO: 1786) |
| 338 | MCT1 (SEQ ID NO: 101) | GATTTTATGTAGGTGTTT (SEQ ID NO: 1787) |
| 339 | MCT1 (SEQ ID NO: 101) | AGTTAGTCGCGTTTTA (SEQ ID NO: 1788) |
| 340 | MCT1 (SEQ ID NO: 101) | AGAGTTAGTTGTGTTTTA (SEQ ID NO: 1789) |
| 341 | SEQ ID NO: 6 (SEQ ID NO: 6) | AAGTTTATCGGCGTTT (SEQ ID NO: 1792) |
| 342 | SEQ ID NO: 6 (SEQ ID NO: 6) | AGAAGTTTATTGGTGTTT (SEQ ID NO: 1793) |
| 343 | SEQ ID NO: 6 (SEQ ID NO: 6) | ATTTCGGAATTTAAGCGT (SEQ ID NO: 1794) |
| 344 | SEQ ID NO: 6 (SEQ ID NO: 6) | TTTTGGAATTTAAGTGTT (SEQ ID NO: 1795) |
| 345 | SEQ ID NO: 6 (SEQ ID NO: 6) | TAATTTCGGACGCGGA (SEQ ID NO: 1796) |
| 346 | SEQ ID NO: 6 (SEQ ID NO: 6) | TTTTGGATGTGGAGGA (SEQ ID NO: 1797) |
| 347 | SEQ ID NO: 6 (SEQ ID NO: 6) | TTACGGTGAAGGCGGA (SEQ ID NO: 1798) |
| 348 | SEQ ID NO: 6 (SEQ ID NO: 6) | TTATGGTGAAGGTGGA (SEQ ID NO: 1799) |
| 349 | SEQ ID NO: 6 (SEQ ID NO: 6) | TTACGGTGAAGGCGGA (SEQ ID NO: 1798) |
| 350 | SEQ ID NO: 6 (SEQ ID NO: 6) | TTATGGTGAAGGTGGA (SEQ ID NO: 1799) |
| 351 | SEQ ID NO: 6 (SEQ ID NO: 6) | TTTCGGTTTTCGTTAAT (SEQ ID NO: 1800) |
| 352 | SEQ ID NO: 6 (SEQ ID NO: 6) | TTTGGTTTTTGTTAATTTAG (SEQ ID NO: |
| | | 1801) |
| 353 | SEQ ID NO: 6 (SEQ ID NO: 6) | TGTGCGAAGTTAACGT (SEQ ID NO: 1802) |
| 354 | SEQ ID NO: 6 (SEQ ID NO: 6) | TTGTGTGAAGTTAATGT (SEQ ID NO: 1803) |
| 355 | SEQ ID NO: 8 (SEQ ID NO: 8) | ATAGGGCGGGATTTTA (SEQ ID NO: 2153) |
| 356 | SEQ ID NO: 8 (SEQ ID NO: 8) | GATAGGGTGGGATTTT (SEQ ID NO: 2154) |
| 357 | SEQ ID NO: 8 (SEQ ID NO: 8) | ATAAAGCGGGGTTTTA (SEQ ID NO: 1804) |
| 358 | SEQ ID NO: 8 (SEQ ID NO: 8) | GGATAAAGTGGGGTTT (SEQ ID NO: 1805) |
| 359 | SEQ ID NO: 8 (SEQ ID NO: 8) | AGGAGGCGAGAAATTT (SEQ ID NO: 1806) |
| 360 | SEQ ID NO: 8 (SEQ ID NO: 8) | GAGGAGGTGAGAAATT (SEQ ID NO: 1807) |
| 361 | SEQ ID NO: 8 (SEQ ID NO: 8) | AGAAATTTCGGGGTAG (SEQ ID NO: 1808) |
| 362 | SEQ ID NO: 8 (SEQ ID NO: 8) | GAAATTTTGGGGTAGTA (SEQ ID NO: 1809) |
| 363 | SEQ ID NO: 8 (SEQ ID NO: 8) | GGTAGTATCGTTTATAGA (SEQ ID NO: 1810) |
| 364 | SEQ ID NO: 8 (SEQ ID NO: 8) | GGGGTAGTATTGTTTATA (SEQ ID NO: 1811) |
| 365 | PROSTAGLANDIN E2 RECEPTOR, EP4 | AGTGTATCGTTTTTCGG (SEQ ID NO: 1812) |
| | SUBTYPE (PROSTANOID EP4 RECEPTOR) | |
| | (PGE RECEPTOR, EP4 SUBTYPE) (SEQ | |
| | ID NO: 10) | |
| 366 | PROSTAGLANDIN E2 RECEPTOR, EP4 | TAGTGTATTGTTTTTTGG (SEQ ID NO: 1813) |
| | SUBTYPE (PROSTANOID EP4 RECEPTOR) | |
| | (PGE RECEPTOR, EP4 SUBTYPE) (SEQ | |
| | ID NO: 10) | |
| 367 | PROSTAGLANDIN E2 RECEPTOR, EP4 | TGCGTATCGTTAGTTA (SEQ ID NO: 1814) |
| | SUBTYPE (PROSTANOID EP4 RECEPTOR) | |
| | (PGE RECEPTOR, EP4 SUBTYPE) (SEQ | |
| | ID NO: 10) | |
| 368 | PROSTAGLANDIN E2 RECEPTOR, EP4 | AGGTTGTGTATTGTTAG (SEQ ID NO: 1815) |
| | SUBTYPE (PROSTANOID EP4 RECEPTOR) | |
| | (PGE RECEPTOR, EP4 SUBTYPE) (SEQ | |
| | ID NO: 10) | |
| 369 | PROSTAGLANDIN E2 RECEPTOR, EP4 | ATTATTTCGGCGGTGA (SEQ ID NO: 1816) |
| | SUBTYPE (PROSTANOID EP4 RECEPTOR) | |
| | (PGE RECEPTOR, EP4 SUBTYPE) (SEQ | |
| | ID NO: 10) | |
| 370 | PROSTAGLANDIN E2 RECEPTOR, EP4 | GATTATTTTGGTGGTGA (SEQ ID NO: 1817) |
| | SUBTYPE (PROSTANOID EP4 RECEPTOR) | |
| | (PGE RECEPTOR, EP4 SUBTYPE) (SEQ | |
| | ID NO: 10) | |
| 371 | PROSTAGLANDIN E2 RECEPTOR, EP4 | TAAGTCGCGTAAGGAG (SEQ ID NO: 1818) |
| | SUBTYPE (PROSTANOID EP4 RECEPTOR) | |
| | (PGE RECEPTOR, EP4 SUBTYPE) (SEQ | |
| | ID NO: 10) | |
| 372 | PROSTAGLANDIN E2 RECEPTOR, EP4 | AAGTTGTGTAAGGAGTA (SEQ ID NO: 1819) |
| | SUBTYPE (PROSTANOID EP4 RECEPTOR) | |
| | (PGE RECEPTOR, EP4 SUBTYPE) (SEQ | |
| | ID NO: 10) | |
| 373 | PROSTAGLANDIN E2 RECEPTOR, EP4 | GTATCGCGAGTTTGGA (SEQ ID NO: 1820) |
| | SUBTYPE (PROSTANOID EP4 RECEPTOR) | |
| | (PGE RECEPTOR, EP4 SUBTYPE) (SEQ | |
| | ID NO: 10) | |
| 374 | PROSTAGLANDIN E2 RECEPTOR, EP4 | GTATTGTGAGTTTGGAG (SEQ ID NO: 1821) |
| | SUBTYPE (PROSTANOID EP4 RECEPTOR) | |
| | (PGE RECEPTOR, EP4 SUBTYPE) (SEQ | |
| | ID NO: 10) | |
| 375 | SEQ ID NO: 51 (SEQ ID NO: 51) | GTCGGGGTCGATTCGA (SEQ ID NO: 1822) |
| 376 | SEQ ID NO: 51 (SEQ ID NO: 51) | GTTGGGGTTGATTTGAT (SEQ ID NO: 1823) |
| 377 | SEQ ID NO: 51 (SEQ ID NO: 51) | AGGATTCGTTTGCGTT (SEQ ID NO: 1824) |
| 378 | SEQ ID NO: 51 (SEQ ID NO: 51) | AAGGATTTGTTTGTGTT (SEQ ID NO: 1825) |
| 379 | MGC34831 (SEQ ID NO: 52) | ATTAGCGTTTGGCGTT (SEQ ID NO: 1826) |
| 380 | MGC34831 (SEQ ID NO: 52) | AATTAGTGTTTGGTGTT (SEQ ID NO: 1827) |
| 381 | MGC34831 (SEQ ID NO: 52) | GTTTAGCGACGGTCGT (SEQ ID NO: 1828) |
| 382 | MGC34831 (SEQ ID NO: 52) | TGTTTAGTGATGGTTGT (SEQ ID NO: 1829) |
| 383 | SEQ ID NO: 54 (SEQ ID NO: 54) | TGTGTAGCGGCGATTA (SEQ ID NO: 1830) |
| 384 | SEQ ID NO: 54 (SEQ ID NO: 54) | GTGTGTAGTGGTGATT (SEQ ID NO: 1831) |
| 385 | SEQ ID NO: 54 (SEQ ID NO: 54) | ATTAGCGTTTGGTCGG (SEQ ID NO: 1832) |
| 386 | SEQ ID NO: 54 (SEQ ID NO: 54) | ATTAGTGTTTGGTTGGG (SEQ ID NO: 1833) |
| 387 | PDLIM1 (SEQ ID NO: 55) | TAGGTCGCGTAGTCGT (SEQ ID NO: 1834) |
| 388 | PDLIM1 (SEQ ID NO: 55) | TTAGGTTGTGTAGTTGT (SEQ ID NO: 1835) |
| 389 | SEQ ID NO: 15 (SEQ ID NO: 15) | AATCGTGCGGTTGATA (SEQ ID NO: 1836) |
| 390 | SEQ ID NO: 15 (SEQ ID NO: 15) | TGTAGAATTGTGTGGT (SEQ ID NO: 1837) |
| 391 | SEQ ID NO: 15 (SEQ ID NO: 15) | TTGCGTAGAAAATTCGAG (SEQ ID NO: 1838) |
| 392 | SEQ ID NO: 15 (SEQ ID NO: 15) | TTGTGTAGAAAATTTGAG (SEQ ID NO: 1839) |
| 393 | SEQ ID NO: 15 (SEQ ID NO: 15) | TTGCGTAGAAAATTCGAG (SEQ ID NO: 1838) |
| 394 | SEQ ID NO: 15 (SEQ ID NO: 15) | TTGTGTAGAAAATTTGAG (SEQ ID NO: 1839) |
| 395 | SEQ ID NO: 15 (SEQ ID NO: 15) | AAAATTCGAGGTCGGG (SEQ ID NO: 1840) |
| 396 | SEQ ID NO: 15 (SEQ ID NO: 15) | AAAATTTGAGGTTGGG (SEQ ID NO: 1841) |
| 397 | SEQ ID NO: 15 (SEQ ID NO: 15) | AAAATTCGAGGTCGGG (SEQ ID NO: 1840) |
| 398 | SEQ ID NO: 15 (SEQ ID NO: 15) | AAAATTTGAGGTTGGG (SEQ ID NO: 1841) |
| 399 | SEQ ID NO: 15 (SEQ ID NO: 15) | AATAGGCGATGTACGG (SEQ ID NO: 2205) |
| 400 | SEQ ID NO: 15 (SEQ ID NO: 15) | TAGGTGATGTATGGGT (SEQ ID NO: 2206) |
| 401 | SEQ ID NO: 15 (SEQ ID NO: 15) | TAATCGAGTTTAGCGG (SEQ ID NO: 2207) |
| 402 | SEQ ID NO: 15 (SEQ ID NO: 15) | TTAATTGAGTTTAGTGGT (SEQ ID NO: 2208) |
| 403 | DKK3 (SEQ ID NO: 24) | ATTCGTTTTAGTTCGAG (SEQ ID NO: 1842) |
| 404 | DKK3 (SEQ ID NO: 24) | ATTTGTTTTAGTTTGAGT (SEQ ID NO: 1843) |
| 405 | DKK3 (SEQ ID NO: 24) | TTCGATCGTTTTAGGA (SEQ ID NO: 1844) |
| 406 | DKK3 (SEQ ID NO: 24) | AGTTTTGATTGTTTTAGG (SEQ ID NO: 1845) |
| 407 | DKK3 (SEQ ID NO: 24) | GAAAAGACGCGATTTT (SEQ ID NO: 1848) |
| 408 | DKK3 (SEQ ID NO: 24) | GAAAAGATGTGATTTTATT (SEQ ID NO: 1849) |
| 409 | SEQ ID NO: 28 (SEQ ID NO: 28) | TATCGACGTTTTTGGT (SEQ ID NO: 1850) |
| 410 | SEQ ID NO: 28 (SEQ ID NO: 28) | TATTGATGTTTTTGGTTT (SEQ ID NO: 1851) |
| 411 | SEQ ID NO: 29 (SEQ ID NO: 29) | TTGATGCGGAGTTCGA (SEQ ID NO: 1852) |
| 412 | SEQ ID NO: 29 (SEQ ID NO: 29) | TTGATGTGGAGTTTGA (SEQ ID NO: 1853) |
| 413 | SEQ ID NO: 29 (SEQ ID NO: 29) | TTGATGCGGAGTTCGA (SEQ ID NO: 1852) |
| 414 | SEQ ID NO: 29 (SEQ ID NO: 29) | TTGATGTGGAGTTTGA (SEQ ID NO: 1853) |
| 415 | SEQ ID NO: 29 (SEQ ID NO: 29) | TTCGAAGCGTGTATTA (SEQ ID NO: 2155) |
| 416 | SEQ ID NO: 29 (SEQ ID NO: 29) | GGGTTTGAAGTGTGTA (SEQ ID NO: 2156) |
| 417 | SEQ ID NO: 29 (SEQ ID NO: 29) | TAGGAACGGTAGGCGG (SEQ ID NO: 1854) |
| 418 | SEQ ID NO: 29 (SEQ ID NO: 29) | TAGGAATGGTAGGTGG (SEQ ID NO: 1855) |
| 419 | SEQ ID NO: 29 (SEQ ID NO: 29) | TAGGAACGGTAGGCGG (SEQ ID NO: 1854) |
| 420 | SEQ ID NO: 29 (SEQ ID NO: 29) | TAGGAATGGTAGGTGG (SEQ ID NO: 1855) |
| 421 | SEQ ID NO: 29 (SEQ ID NO: 29) | GTCGGAGGCGTTTGAG (SEQ ID NO: 1856) |
| 422 | SEQ ID NO: 29 (SEQ ID NO: 29) | GTTGGAGGTGTTTGAGA (SEQ ID NO: 1857) |
| 423 | ARL7 (SEQ ID NO: 30) | TAGATTTCGTAGTTTTTTA (SEQ ID NO: 1858) |
| 424 | ARL7 (SEQ ID NO: 30) | TAGATTTTGTAGTTTTTTAA (SEQ ID NO: |
| | | 1859) |
| 425 | ARL7 (SEQ ID NO: 30) | TGGGTACGTTTACGGT (SEQ ID NO: 1860) |
| 426 | ARL7 (SEQ ID NO: 30) | TGGGTATGTTTATGGTT (SEQ ID NO: 1861) |
| 427 | ARL7 (SEQ ID NO: 30) | GAAGAAATCGTTTTTGT (SEQ ID NO: 1862) |
| 428 | ARL7 (SEQ ID NO: 30) | GAAGAAATTGTTTTTGTT (SEQ ID NO: 1863) |
| 429 | ARL7 (SEQ ID NO: 30) | TAGTAGGATCGGTTTTT (SEQ ID NO: 1864) |
| 430 | ARL7 (SEQ ID NO: 30) | ATAGTAGGATTGGTTTTT (SEQ ID NO: 1865) |
| 431 | SEQ ID NO: 31 (SEQ ID NO: 31) | AACGTTGCGTTGGGTA (SEQ ID NO: 1866) |
| 432 | SEQ ID NO: 31 (SEQ ID NO: 31) | AATGTTGTGTTGGGTAA (SEQ ID NO: 1867) |
| 433 | SEQ ID NO: 31 (SEQ ID NO: 31) | TAGCGTTTCGTGGTTA (SEQ ID NO: 1868) |
| 434 | SEQ ID NO: 31 (SEQ ID NO: 31) | GTAGTGTTTTGTGGTTA (SEQ ID NO: 1869) |
| 435 | THH (SEQ ID NO: 32) | GTTCGTTGGCGTAAAT (SEQ ID NO: 1872) |
| 436 | THH (SEQ ID NO: 32) | GGTTTGTTGGTGTAAAT (SEQ ID NO: 1873) |
| 437 | (SEQ ID NO: 36) | TTATTTGCGTTTCGAA (SEQ ID NO: 2209) |
| 438 | (SEQ ID NO: 36) | AATTATTTGTGTTTTGAAT (SEQ ID NO: 2210) |
| 439 | (SEQ ID NO: 36) | GGACGTTGCGATTGTA (SEQ ID NO: 2161) |
| 440 | (SEQ ID NO: 36) | GATGTTGTGATTGTAGT (SEQ ID NO: 2162) |
| 441 | SENP3 (SEQ ID NO: 39) | TAGTCGAAAGTAGGACGT (SEQ ID NO: 1878) |
| 442 | SENP3 (SEQ ID NO: 39) | TAGTTGAAAGTAGGATGT (SEQ ID NO: 1879) |
| 443 | SENP3 (SEQ ID NO: 39) | TAGTCGAAAGTAGGACGT (SEQ ID NO: 1878) |
| 444 | SENP3 (SEQ ID NO: 39) | TAGTTGAAAGTAGGATGT (SEQ ID NO: 1879) |
| 445 | SENP3 (SEQ ID NO: 39) | AGGACGTTTTTGATCGG (SEQ ID NO: 1880) |
| 446 | SENP3 (SEQ ID NO: 39) | AGGATGTTTTTGATTGG (SEQ ID NO: 1881) |
| 447 | SENP3 (SEQ ID NO: 39) | AGGACGTTTTTGATCGG (SEQ ID NO: 1880) |
| 448 | SENP3 (SEQ ID NO: 39) | AGGATGTTTTTGATTGG (SEQ ID NO: 1881) |
| 449 | SENP3 (SEQ ID NO: 39) | AGTTATCGTTAGGAGGG (SEQ ID NO: 1882) |
| 450 | SENP3 (SEQ ID NO: 39) | AGTTATTGTTAGGAGGG (SEQ ID NO: 1883) |
| 451 | SENP3 (SEQ ID NO: 39) | AGTTATCGTTAGGAGGG (SEQ ID NO: 1882) |
| 452 | SENP3 (SEQ ID NO: 39) | AGTTATTGTTAGGAGGG (SEQ ID NO: 1883) |
| 453 | SEQ ID NO: 42 (SEQ ID NO: 42) | GAGTCGGGTTGCGATG (SEQ ID NO: 1884) |
| 454 | SEQ ID NO: 42 (SEQ ID NO: 42) | GGAGTTGGGTTGTGAT (SEQ ID NO: 1885) |
| 455 | (SEQ ID NO: 117) | TAGCGGTTTTTTAGCGTA (SEQ ID NO: 1888) |
| 456 | (SEQ ID NO: 117) | AGTGGTTTTTTAGTGTAT (SEQ ID NO: 1889) |
| 457 | (SEQ ID NO: 117) | AGATGCGCGGGTAGAT (SEQ ID NO: 1890) |
| 458 | (SEQ ID NO: 117) | AGATGTGTGGGTAGAT (SEQ ID NO: 1891) |
| 459 | (SEQ ID NO: 117) | AGATGCGCGGGTAGAT (SEQ ID NO: 1890) |
| 460 | (SEQ ID NO: 117) | AGATGTGTGGGTAGAT (SEQ ID NO: 1891) |
| 461 | (SEQ ID NO: 117) | AGATAGTTCGTATTCGT (SEQ ID NO: 1892) |
| 462 | (SEQ ID NO: 117) | GTAGATAGTTTGTATTTGT (SEQ ID NO: 1893) |
| 463 | (SEQ ID NO: 117) | TTTGTTCGTAACGTTT (SEQ ID NO: 1894) |
| 464 | (SEQ ID NO: 117) | TGTTTGTAATGTTTAGAG (SEQ ID NO: 1895) |
| 465 | O60279 (SEQ ID NO: 47) | AGTAAACGAATAAGAAGT (SEQ ID NO: 1896) |
| 466 | O60279 (SEQ ID NO: 47) | AAGTAAATGAATAAGAAGT (SEQ ID NO: 1897) |
| 467 | O60279 (SEQ ID NO: 47) | TACGTTTTTTCGGATTA (SEQ ID NO: 1898) |
| 468 | O60279 (SEQ ID NO: 47) | TATGTTTTTTTGGATTAAG (SEQ ID NO: 1899) |
| 469 | O60279 (SEQ ID NO: 47) | TAATTATCGGCGGTGT (SEQ ID NO: 1900) |
| 470 | O60279 (SEQ ID NO: 47) | ATTATTGGTGGTGTTTT (SEQ ID NO: 1901) |
| 471 | O60279 (SEQ ID NO: 47) | GGACGGCGGAAAATTA (SEQ ID NO: 1902) |
| 472 | O60279 (SEQ ID NO: 47) | AGGGATGGTGGAAAAT (SEQ ID NO: 1903) |
| 473 | SEQ ID NO: 48 (SEQ ID NO: 48) | TATTTGGCGATTCGGA (SEQ ID NO: 1904) |
| 474 | SEQ ID NO: 48 (SEQ ID NO: 48) | TGGTGATTTGGAGATT (SEQ ID NO: 1905) |
| 475 | SEQ ID NO: 48 (SEQ ID NO: 48) | TAGGGTTACGTGTCGG (SEQ ID NO: 1906) |
| 476 | SEQ ID NO: 48 (SEQ ID NO: 48) | TAGGGTTATGTGTTGG (SEQ ID NO: 1907) |
| 477 | SEQ ID NO: 48 (SEQ ID NO: 48) | TAGGGTTACGTGTCGG (SEQ ID NO: 1906) |
| 478 | SEQ ID NO: 48 (SEQ ID NO: 48) | TAGGGTTATGTGTTGG (SEQ ID NO: 1907) |
| 479 | SEQ ID NO: 48 (SEQ ID NO: 48) | AACGAATTTTTCGATATT (SEQ ID NO: 1908) |
| 480 | SEQ ID NO: 48 (SEQ ID NO: 48) | TTTAATGAATTTTTTGATATT (SEQ ID NO: |
| | | 1909) |
| 481 | SEQ ID NO: 48 (SEQ ID NO: 48) | AAAATCGTATGCGTGT (SEQ ID NO: 1910) |
| 482 | SEQ ID NO: 48 (SEQ ID NO: 48) | GAAAATTGTATGTGTGTG (SEQ ID NO: 1911) |
| 483 | SEQ ID NO: 9 (SEQ ID NO: 9) | GTTTCGCGTTTAGGGA (SEQ ID NO: 1912) |
| 484 | SEQ ID NO: 9 (SEQ ID NO: 9) | GTTTTGTGTTTAGGGAT (SEQ ID NO: 1913) |
| 485 | SEQ ID NO: 9 (SEQ ID NO: 9) | AGTGTTCGTCGTAGTT (SEQ ID NO: 1914) |
| 486 | SEQ ID NO: 9 (SEQ ID NO: 9) | TGAGTGTTTGTTGTAGT (SEQ ID NO: 1915) |
| 487 | SEQ ID NO: 4 (SEQ ID NO: 4) | TTTTGTTCGCGTTGAA (SEQ ID NO: 1916) |
| 488 | SEQ ID NO: 4 (SEQ ID NO: 4) | TTGTTTGTGTTGAAGTA (SEQ ID NO: 1917) |
| 489 | SEQ ID NO: 4 (SEQ ID NO: 4) | GGGTCGCGAGGTAGTT (SEQ ID NO: 1918) |
| 490 | SEQ ID NO: 4 (SEQ ID NO: 4) | TGGGTTGTGAGGTAGT (SEQ ID NO: 1919) |
| 491 | SEQ ID NO: 4 (SEQ ID NO: 4) | TTTGTGCGACGTTATT (SEQ ID NO: 1920) |
| 492 | SEQ ID NO: 4 (SEQ ID NO: 4) | GGTTTGTGTGATGTTAT (SEQ ID NO: 1921) |
| 493 | SEQ ID NO: 4 (SEQ ID NO: 4) | ATGGCGGTTTCGATTT (SEQ ID NO: 1922) |
| 494 | SEQ ID NO: 4 (SEQ ID NO: 4) | GATGGTGGTTTTGATTT (SEQ ID NO: 1923) |
| 495 | SEQ ID NO: 5 (SEQ ID NO: 5) | AATGAGCGAGAAAGTA (SEQ ID NO: 1924) |
| 496 | SEQ ID NO: 5 (SEQ ID NO: 5) | AGAATGAGTGAGAAAGT (SEQ ID NO: 1925) |
| 497 | SEQ ID NO: 5 (SEQ ID NO: 5) | ATTAAACGGGATGGTT (SEQ ID NO: 1926) |
| 498 | SEQ ID NO: 5 (SEQ ID NO: 5) | AATATTAAATGGGATGGT (SEQ ID NO: 1927) |
| 499 | SEQ ID NO: 5 (SEQ ID NO: 5) | GAGTTGCGAGGATTTT (SEQ ID NO: 1928) |
| 500 | SEQ ID NO: 5 (SEQ ID NO: 5) | GGAGTTGTGAGGATTT (SEQ ID NO: 1929) |
| 501 | SEQ ID NO: 5 (SEQ ID NO: 5) | GGGAATCGTTGATTTT (SEQ ID NO: 1930) |
| 502 | SEQ ID NO: 5 (SEQ ID NO: 5) | AGGGGAATTGTTGATT (SEQ ID NO: 1931) |
| 503 | SEQ ID NO: 7 (SEQ ID NO: 7) | TAGTCGTCGTGTAGGA (SEQ ID NO: 1932) |
| 504 | SEQ ID NO: 7 (SEQ ID NO: 7) | TAGGTAGTTGTTGTGTA (SEQ ID NO: 1933) |
| 505 | SEQ ID NO: 7 (SEQ ID NO: 7) | TATAGGTACGCGATGA (SEQ ID NO: 1934) |
| 506 | SEQ ID NO: 7 (SEQ ID NO: 7) | AGGTATGTGATGAGGA (SEQ ID NO: 1935) |
| 507 | SEQ ID NO: 7 (SEQ ID NO: 7) | ATGATTTGCGTTACGT (SEQ ID NO: 1938) |
| 508 | SEQ ID NO: 7 (SEQ ID NO: 7) | ATGATTTGTGTTATGTTT (SEQ ID NO: 1939) |
| 509 | SEQ ID NO: 7 (SEQ ID NO: 7) | TAACGTTGTGGTTCGAA (SEQ ID NO: 1940) |
| 510 | SEQ ID NO: 7 (SEQ ID NO: 7) | TAATGTTGTGGTTTGAA (SEQ ID NO: 1941) |
| 511 | SEQ ID NO: 7 (SEQ ID NO: 7) | TAACGTTGTGGTTCGAA (SEQ ID NO: 1940) |
| 512 | SEQ ID NO: 7 (SEQ ID NO: 7) | TAATGTTGTGGTTTGAA (SEQ ID NO: 1941) |
| 513 | SEQ ID NO: 1 (SEQ ID NO: 1) | GGTCGGCGTTGATTTTA (SEQ ID NO: 1942) |
| 514 | SEQ ID NO: 1 (SEQ ID NO: 1) | GGTTGGTGTTGATTTTA (SEQ ID NO: 1943) |
| 515 | SEQ ID NO: 1 (SEQ ID NO: 1) | GGTCGGCGTTGATTTTA (SEQ ID NO: 1942) |
| 516 | SEQ ID NO: 1 (SEQ ID NO: 1) | GGTTGGTGTTGATTTTA (SEQ ID NO: 1943) |
| 517 | SEQ ID NO: 1 (SEQ ID NO: 1) | GATTCGAACGGATTTT (SEQ ID NO: 1944) |
| 518 | SEQ ID NO: 1 (SEQ ID NO: 1) | GGGATTTGAATGGATTT (SEQ ID NO: 1945) |
| 519 | SEQ ID NO: 1 (SEQ ID NO: 1) | TGGGTCGGGATTCGAA (SEQ ID NO: 1946) |
| 520 | SEQ ID NO: 1 (SEQ ID NO: 1) | TGGGTTGGGATTTGAA (SEQ ID NO: 1947) |
| 521 | SEQ ID NO: 1 (SEQ ID NO: 1) | TGGGTCGGGATTCGAA (SEQ ID NO: 1946) |
| 522 | SEQ ID NO: 1 (SEQ ID NO: 1) | TGGGTTGGGATTTGAA (SEQ ID NO: 1947) |
| 523 | SEQ ID NO: 1 (SEQ ID NO: 1) | GTCGGAAGTTTCGGGA (SEQ ID NO: 1948) |
| 524 | SEQ ID NO: 1 (SEQ ID NO: 1) | GTTGGAAGTTTTGGGAT (SEQ ID NO: 1949) |
| 525 | SEQ ID NO: 1 (SEQ ID NO: 1) | TGGATATCGTAGGGTA (SEQ ID NO: 1950) |
| 526 | SEQ ID NO: 1 (SEQ ID NO: 1) | TGGATATTGTAGGGTAG (SEQ ID NO: 1951) |
| 527 | PROSTAGLANDIN E2 RECEPTOR, EP4 | AGGTAATCGAGGCGGT (SEQ ID NO: 1952) |
| | SUBTYPE (PROSTANOID EP4 RECEPTOR) | |
| | (PGE RECEPTOR, EP4 SUBTYPE) (SEQ | |
| | ID NO: 10) | |
| 528 | PROSTAGLANDIN E2 RECEPTOR, EP4 | AGGTAATTGAGGTGGT (SEQ ID NO: 1953) |
| | SUBTYPE (PROSTANOID EP4 RECEPTOR) | |
| | (PGE RECEPTOR, EP4 SUBTYPE) (SEQ | |
| | ID NO: 10) | |
| 529 | PROSTAGLANDIN E2 RECEPTOR, EP4 | AGGTAATCGAGGCGGT (SEQ ID NO: 1952) |
| | SUBTYPE (PROSTANOID EP4 RECEPTOR) | |
| | (PGE RECEPTOR, EP4 SUBTYPE) (SEQ | |
| | ID NO: 10) | |
| 530 | PROSTAGLANDIN E2 RECEPTOR, EP4 | AGGTAATTGAGGTGGT (SEQ ID NO: 1953) |
| | SUBTYPE (PROSTANOID EP4 RECEPTOR) | |
| | (PGE RECEPTOR, EP4 SUBTYPE) (SEQ | |
| | ID NO: 10) | |
| 531 | PROSTAGLANDIN E2 RECEPTOR, EP4 | GGCGTCGAAAGTCGTT (SEQ ID NO: 1954) |
| | SUBTYPE (PROSTANOID EP4 RECEPTOR) | |
| | (PGE RECEPTOR, EP4 SUBTYPE) (SEQ | |
| | ID NO: 10) | |
| 532 | PROSTAGLANDIN E2 RECEPTOR, EP4 | GGTGTTGAAAGTTGTTG (SEQ ID NO: 1955) |
| | SUBTYPE (PROSTANOID EP4 RECEPTOR) | |
| | (PGE RECEPTOR, EP4 SUBTYPE) (SEQ | |
| | ID NO: 10) | |
| 533 | PROSTAGLANDIN E2 RECEPTOR, EP4 | TAATCGTTTGTTTACGT (SEQ ID NO: 1956) |
| | SUBTYPE (PROSTANOID EP4 RECEPTOR) | |
| | (PGE RECEPTOR, EP4 SUBTYPE) (SEQ | |
| | ID NO: 10) | |
| 534 | PROSTAGLANDIN E2 RECEPTOR, EP4 | AATTGTTTGTTTATGTAGT (SEQ ID NO: 1957) |
| | SUBTYPE (PROSTANOID EP4 RECEPTOR) | |
| | (PGE RECEPTOR, EP4 SUBTYPE) (SEQ | |
| | ID NO: 10) | |
| 535 | ORPHAN NUCLEAR RECEPTOR NR5A2 | TTACGGAGGCGTTTTA (SEQ ID NO: 1958) |
| | (ALPHA-1-FETOPROTEIN | |
| | TRANSCRIPTION FACTOR) | |
| | (HEPATOCYTIC TRANSCRIPTION | |
| | FACTOR) (B1-BINDING FACTOR) | |
| | (HB1F) (CYP7A PROMOTER BINDING | |
| | FACTOR) (SEQ ID NO: 11) | |
| 536 | ORPHAN NUCLEAR RECEPTOR NR5A2 | TTTTATGGAGGTGTTTT (SEQ ID NO: 1959) |
| | (ALPHA-1-FETOPROTEIN | |
| | TRANSCRIPTION FACTOR) | |
| | (HEPATOCYTIC TRANSCRIPTION | |
| | FACTOR) (B1-BINDING FACTOR) | |
| | (HB1F) (CYP7A PROMOTER BINDING | |
| | FACTOR) (SEQ ID NO: 11) | |
| 537 | ORPHAN NUCLEAR RECEPTOR NR5A2 | AGGCGAATTTATCGGG (SEQ ID NO: 1960) |
| | (ALPHA-1-FETOPROTEIN | |
| | TRANSCRIPTION FACTOR) | |
| | (HEPATOCYTIC TRANSCRIPTION | |
| | FACTOR) (B1-BINDING FACTOR) | |
| | (HB1F) (CYP7A PROMOTER BINDING | |
| | FACTOR) (SEQ ID NO: 11) | |
| 538 | ORPHAN NUCLEAR RECEPTOR NR5A2 | GGTGAATTTATTGGGG (SEQ ID NO: 1961) |
| | (ALPHA-1-FETOPROTEIN | |
| | TRANSCRIPTION FACTOR) | |
| | (HEPATOCYTIC TRANSCRIPTION | |
| | FACTOR) (B1-BINDING FACTOR) | |
| | (HB1F) (CYP7A PROMOTER BINDING | |
| | FACTOR) (SEQ ID NO: 11) | |
| 539 | ORPHAN NUCLEAR RECEPTOR NR5A2 | TAGTCGAAGTAGGCGT (SEQ ID NO: 1962) |
| | (ALPHA-1-FETOPROTEIN | |
| | TRANSCRIPTION FACTOR) | |
| | (HEPATOCYTIC TRANSCRIPTION | |
| | FACTOR) (B1-BINDING FACTOR) | |
| | (HB1F) (CYP7A PROMOTER BINDING | |
| | FACTOR) (SEQ ID NO: 11) | |
| 540 | ORPHAN NUCLEAR RECEPTOR NR5A2 | TAGTTGAAGTAGGTGTT (SEQ ID NO: 1963) |
| | (ALPHA-1-FETOPROTEIN | |
| | TRANSCRIPTION FACTOR) | |
| | (HEPATOCYTIC TRANSCRIPTION | |
| | FACTOR) (B1-BINDING FACTOR) | |
| | (HB1F) (CYP7A PROMOTER BINDING | |
| | FACTOR) (SEQ ID NO: 11) | |
| 541 | ORPHAN NUCLEAR RECEPTOR NR5A2 | TTTTCGACGAAGTTTT (SEQ ID NO: 1964) |
| | (ALPHA-1-FETOPROTEIN | |
| | TRANSCRIPTION FACTOR) | |
| | (HEPATOCYTIC TRANSCRIPTION | |
| | FACTOR) (B1-BINDING FACTOR) | |
| | (HB1F) (CYP7A PROMOTER BINDING | |
| | FACTOR) (SEQ ID NO: 11) | |
| 542 | ORPHAN NUCLEAR RECEPTOR NR5A2 | TTTTGATGAAGTTTTGTT (SEQ ID NO: 1965) |
| | (ALPHA-1-FETOPROTEIN | |
| | TRANSCRIPTION FACTOR) | |
| | (HEPATOCYTIC TRANSCRIPTION | |
| | FACTOR) (B1-BINDING FACTOR) | |
| | (HB1F) (CYP7A PROMOTER BINDING | |
| | FACTOR) (SEQ ID NO: 11) | |
| 543 | LIM DOMAIN KINASE 1 (EC | TGTAGTCGGGAGGTTA (SEQ ID NO: 1966) |
| | 2.7.1.37) (LIMK-1) (SEQ ID NO: | |
| | 12) | |
| 544 | LIM DOMAIN KINASE 1 (EC | TGTAGTTGGGAGGTTA (SEQ ID NO: 1967) |
| | 2.7.1.37) (LIMK-1) (SEQ ID NO: | |
| | 12) | |
| 545 | LIM DOMAIN KINASE 1 (EC | TGTAGTCGGGAGGTTA (SEQ ID NO: 1966) |
| | 2.7.1.37) (LIMK-1) (SEQ ID NO: | |
| | 12) | |
| 546 | LIM DOMAIN KINASE 1 (EC | TGTAGTTGGGAGGTTA (SEQ ID NO: 1967) |
| | 2.7.1.37) (LIMK-1) (SEQ ID NO: | |
| | 12) | |
| 547 | LIM DOMAIN KINASE 1 (EC | GGATTATCGCGGGGGT (SEQ ID NO: 1968) |
| | 2.7.1.37) (LIMK-1) (SEQ ID NO: | |
| | 12) | |
| 548 | LIM DOMAIN KINASE 1 (EC | GGATTATTGTGGGGGT (SEQ ID NO: 1969) |
| | 2.7.1.37) (LIMK-1) (SEQ ID NO: | |
| | 12) | |
| 549 | LIM DOMAIN KINASE 1 (EC | GGATTATCGCGGGGGT (SEQ ID NO: 1968) |
| | 2.7.1.37) (LIMK-1) (SEQ ID NO: | |
| | 12) | |
| 550 | LIM DOMAIN KINASE 1 (EC | GGATTATTGTGGGGGT (SEQ ID NO: 1969) |
| | 2.7.1.37) (LIMK-1) (SEQ ID NO: | |
| | 12) | |
| 551 | LIM DOMAIN KINASE 1 (EC | GTCGGTAGTTTATCGGAT (SEQ ID NO: 1970) |
| | 2.7.1.37) (LIMK-1) (SEQ ID NO: | |
| | 12) | |
| 552 | LIM DOMAIN KINASE 1 (EC | GTTGGTAGTTTATTGGAT (SEQ ID NO: 1971) |
| | 2.7.1.37) (LIMK-1) (SEQ ID NO: | |
| | 12) | |
| 553 | LIM DOMAIN KINASE 1 (EC | GTCGGTAGTTTATCGGAT (SEQ ID NO: 1970) |
| | 2.7.1.37) (LIMK-1) (SEQ ID NO: | |
| | 12) | |
| 554 | LIM DOMAIN KINASE 1 (EC | GTTGGTAGTTTATTGGAT (SEQ ID NO: 1971) |
| | 2.7.1.37) (LIMK-1) (SEQ ID NO: | |
| | 12) | |
| 555 | LIM DOMAIN KINASE 1 (EC | TAGGAGACGTTACGTT (SEQ ID NO: 1972) |
| | 2.7.1.37) (LIMK-1) (SEQ ID NO: | |
| | 12) | |
| 556 | LIM DOMAIN KINASE 1 (EC | AGATGTTATGTTAGGGT (SEQ ID NO: 1973) |
| | 2.7.1.37) (LIMK-1) (SEQ ID NO: | |
| | 12) | |
| 557 | BCL11B (SEQ ID NO: 50) | AAGTCGTCGGAGTTAG (SEQ ID NO: 1976) |
| 558 | BCL11B (SEQ ID NO: 50) | GTGAAGTTGTTGGAGT (SEQ ID NO: 1977) |
| 559 | BCL11B (SEQ ID NO: 50) | TTGAGGCGTTACGGTT (SEQ ID NO: 1978) |
| 560 | BCL11B (SEQ ID NO: 50) | TTGAGGTGTTATGGTT (SEQ ID NO: 1979) |
| 561 | BCL11B (SEQ ID NO: 50) | TTGAGGCGTTACGGTT (SEQ ID NO: 1978) |
| 562 | BCL11B (SEQ ID NO: 50) | TTGAGGTGTTATGGTT (SEQ ID NO: 1979) |
| 563 | MSF (SEQ ID NO: 13) | GTTTCGAAATTGGCGT (SEQ ID NO: 1980) |
| 564 | MSF (SEQ ID NO: 13) | TTTGAAATTGGTGTGG (SEQ ID NO: 1981) |
| 565 | MSF (SEQ ID NO: 13) | TTCGGTTTACGGGTTGTA (SEQ ID NO: 1982) |
| 566 | MSF (SEQ ID NO: 13) | TTTGGTTTATGGGTTGTA (SEQ ID NO: 1983) |
| 567 | MSF (SEQ ID NO: 13) | TTCGGTTTACGGGTTGTA (SEQ ID NO: 1982) |
| 568 | MSF (SEQ ID NO: 13) | TTTGGTTTATGGGTTGTA (SEQ ID NO: 1983) |
| 569 | MSF (SEQ ID NO: 13) | TTACGGTTCGATTTTG (SEQ ID NO: 1984) |
| 570 | MSF (SEQ ID NO: 13) | TATGGTTTGATTTTGGG (SEQ ID NO: 1985) |
| 571 | SEQ ID NO: 14 (SEQ ID NO: 14) | TAAGGCGTTTTCGATA (SEQ ID NO: 1986) |
| 572 | SEQ ID NO: 14 (SEQ ID NO: 14) | GTAAGGTGTTTTTGATAT (SEQ ID NO: 1987) |
| 573 | SEQ ID NO: 16 (SEQ ID NO: 16) | ATCGTTGGTCGGATTT (SEQ ID NO: 1990) |
| 574 | SEQ ID NO: 16 (SEQ ID NO: 16) | TAGGATTGTTGGTTGGA (SEQ ID NO: 1991) |
| 575 | SEQ ID NO: 16 (SEQ ID NO: 16) | AGGAGTTTTCGTGTCGT (SEQ ID NO: 1992) |
| 576 | SEQ ID NO: 16 (SEQ ID NO: 16) | AGGAGTTTTTGTGTTGT (SEQ ID NO: 1993) |
| 577 | SEQ ID NO: 16 (SEQ ID NO: 16) | AGGAGTTTTCGTGTCGT (SEQ ID NO: 1992) |
| 578 | SEQ ID NO: 16 (SEQ ID NO: 16) | AGGAGTTTTTGTGTTGT (SEQ ID NO: 1993) |
| 579 | SEQ ID NO: 16 (SEQ ID NO: 16) | TTACGGATAGGGCGAT (SEQ ID NO: 1994) |
| 580 | SEQ ID NO: 16 (SEQ ID NO: 16) | TATGGATAGGGTGATTT (SEQ ID NO: 1995) |
| 581 | SEQ ID NO: 16 (SEQ ID NO: 16) | AGGCGTTGTCGGTGAT (SEQ ID NO: 1996) |
| 582 | SEQ ID NO: 16 (SEQ ID NO: 16) | AGGTGTTGTTGGTGATA (SEQ ID NO: 1997) |
| 583 | SEQ ID NO: 17 (SEQ ID NO: 17) | TACGTTTCGGGTTTGTTA (SEQ ID NO: 1998) |
| 584 | SEQ ID NO: 17 (SEQ ID NO: 17) | TATGTTTTGGGTTTGTTA (SEQ ID NO: 1999) |
| 585 | SEQ ID NO: 17 (SEQ ID NO: 17) | TACGTTTCGGGTTTGTTA (SEQ ID NO: 1998) |
| 586 | SEQ ID NO: 17 (SEQ ID NO: 17) | TATGTTTTGGGTTTGTTA (SEQ ID NO: 1999) |
| 587 | SEQ ID NO: 17 (SEQ ID NO: 17) | ATTTAGTCGTGCGTTT (SEQ ID NO: 2000) |
| 588 | SEQ ID NO: 17 (SEQ ID NO: 17) | TGATTTAGTTGTGTGTT (SEQ ID NO: 2001) |
| 589 | SEQ ID NO: 18 (SEQ ID NO: 18) | TTTACGCGGGGTTTTA (SEQ ID NO: 2002) |
| 590 | SEQ ID NO: 18 (SEQ ID NO: 18) | TTTATGTGGGGTTTTAG (SEQ ID NO: 2003) |
| 591 | SEQ ID NO: 18 (SEQ ID NO: 18) | TTACGTCGTTATTAGGT (SEQ ID NO: 2004) |
| 592 | SEQ ID NO: 18 (SEQ ID NO: 18) | TTTTATGTTGTTATTAGGT (SEQ ID NO: 2005) |
| 593 | SEQ ID NO: 18 (SEQ ID NO: 18) | TATTTGGACGTCGGGT (SEQ ID NO: 2006) |
| 594 | SEQ ID NO: 18 (SEQ ID NO: 18) | TATTTGGATGTTGGGT (SEQ ID NO: 2007) |
| 595 | SEQ ID NO: 18 (SEQ ID NO: 18) | TATTTGGACGTCGGGT (SEQ ID NO: 2006) |
| 596 | SEQ ID NO: 18 (SEQ ID NO: 18) | TATTTGGATGTTGGGT (SEQ ID NO: 2007) |
| 597 | SEQ ID NO: 18 (SEQ ID NO: 18) | GAGGCGTATTAGGTCGG (SEQ ID NO: 2008) |
| 598 | SEQ ID NO: 18 (SEQ ID NO: 18) | AGGTGTATTAGGTTGGG (SEQ ID NO: 2009) |
| 599 | SEQ ID NO: 18 (SEQ ID NO: 18) | AAAGCGGAGTCGTTAG (SEQ ID NO: 2010) |
| 600 | SEQ ID NO: 18 (SEQ ID NO: 18) | AGTGGAGTTGTTAGGT (SEQ ID NO: 2011) |
| 601 | SEQ ID NO: 19 (SEQ ID NO: 19) | AGGTTTTCGTTGTAGTA (SEQ ID NO: 2012) |
| 602 | SEQ ID NO: 19 (SEQ ID NO: 19) | TAGGTTTTTGTTGTAGTA (SEQ ID NO: 2013) |
| 603 | SEQ ID NO: 19 (SEQ ID NO: 19) | TGAGATTCGTTTTTTAAA (SEQ ID NO: 2014) |
| 604 | SEQ ID NO: 19 (SEQ ID NO: 19) | GGTGAGATTTGTTTTTTA (SEQ ID NO: 2015) |
| 605 | PRDM6 (SEQ ID NO: 20) | AGTTTTAAGCGTTTGGT (SEQ ID NO: 2016) |
| 606 | PRDM6 (SEQ ID NO: 20) | AGTTTTAAGTGTTTGGT (SEQ ID NO: 2017) |
| 607 | PRDM6 (SEQ ID NO: 20) | AGTTTTAAGCGTTTGGT (SEQ ID NO: 2016) |
| 608 | PRDM6 (SEQ ID NO: 20) | AGTTTTAAGTGTTTGGT (SEQ ID NO: 2017) |
| 609 | PRDM6 (SEQ ID NO: 20) | GAAGTTCGGATTTCGG (SEQ ID NO: 2018) |
| 610 | PRDM6 (SEQ ID NO: 20) | GGAAGTTTGGATTTTGG (SEQ ID NO: 2019) |
| 611 | PRDM6 (SEQ ID NO: 20) | TTGTCGGGTTACGGGA (SEQ ID NO: 2020) |
| 612 | PRDM6 (SEQ ID NO: 20) | GTTGGGTTATGGGAGA (SEQ ID NO: 2021) |
| 613 | PRDM6 (SEQ ID NO: 20) | TTCGTAGAATTGTCGAAG (SEQ ID NO: 2022) |
| 614 | PRDM6 (SEQ ID NO: 20) | TTTGTAGAATTGTTGAAG (SEQ ID NO: 2023) |
| 615 | PRDM6 (SEQ ID NO: 20) | TTCGTAGAATTGTCGAAG (SEQ ID NO: 2022) |
| 616 | PRDM6 (SEQ ID NO: 20) | TTTGTAGAATTGTTGAAG (SEQ ID NO: 2023) |
| 617 | RAP2B (SEQ ID NO: 21) | GGTCGGGTAATCGTTA (SEQ ID NO: 2024) |
| 618 | RAP2B (SEQ ID NO: 21) | GTTGGGTAATTGTTAGA (SEQ ID NO: 2025) |
| 619 | NR2E1 (SEQ ID NO: 22) | AATGTAGCGGCGTTAT (SEQ ID NO: 2028) |
| 620 | NR2E1 (SEQ ID NO: 22) | TAAATGTAGTGGTGTTAT (SEQ ID NO: 2029) |
| 621 | NR2E1 (SEQ ID NO: 22) | GTCGTTATCGGTTTGGA (SEQ ID NO: 2030) |
| 622 | NR2E1 (SEQ ID NO: 22) | GTTGTTATTGGTTTGGA (SEQ ID NO: 2031) |
| 623 | NR2E1 (SEQ ID NO: 22) | GTCGTTATCGGTTTGGA (SEQ ID NO: 2030) |
| 624 | NR2E1 (SEQ ID NO: 22) | GTTGTTATTGGTTTGGA (SEQ ID NO: 2031) |
| 625 | NR2E1 (SEQ ID NO: 22) | GACGTAAGTTTCGGGT (SEQ ID NO: 2032) |
| 626 | NR2E1 (SEQ ID NO: 22) | GGATGTAAGTTTTGGG (SEQ ID NO: 2033) |
| 627 | NR2E1 (SEQ ID NO: 22) | TTTTTAGTCGCGAGAA (SEQ ID NO: 2034) |
| 628 | NR2E1 (SEQ ID NO: 22) | TTTTTAGTTGTGAGAAGT (SEQ ID NO: 2035) |
| 629 | NR2E1 (SEQ ID NO: 22) | TTCGGGTGATATCGTTT (SEQ ID NO: 2036) |
| 630 | NR2E1 (SEQ ID NO: 22) | TTTGGGTGATATTGTTT (SEQ ID NO: 2037) |
| 631 | NR2E1 (SEQ ID NO: 22) | TTCGGGTGATATCGTTT (SEQ ID NO: 2036) |
| 632 | NR2E1 (SEQ ID NO: 22) | TTTGGGTGATATTGTTT (SEQ ID NO: 2037) |
| 633 | NR2E1 (SEQ ID NO: 22) | AGGCGAGTCGGAGTTT (SEQ ID NO: 2038) |
| 634 | NR2E1 (SEQ ID NO: 22) | AGGTGAGTTGGAGTTTT (SEQ ID NO: 2039) |
| 635 | NR2E1 (SEQ ID NO: 22) | TAAGTCGAGCGAGTTT (SEQ ID NO: 2040) |
| 636 | NR2E1 (SEQ ID NO: 22) | TAGTAAGTTGAGTGAGT (SEQ ID NO: 2041) |
| 637 | NR2E1 (SEQ ID NO: 22) | AGGGACGCGAAAATTT (SEQ ID NO: 2042) |
| 638 | NR2E1 (SEQ ID NO: 22) | GGAGGGATGTGAAAAT (SEQ ID NO: 2043) |
| 639 | PCDH7 (SEQ ID NO: 23) | ATCGTAGTCGGTTTTA (SEQ ID NO: 2044) |
| 640 | PCDH7 (SEQ ID NO: 23) | GATTATTGTAGTTGGTTT (SEQ ID NO: 2045) |
| 641 | RTTN (SEQ ID NO: 25) | TAGTGGCGCGGTAGTT (SEQ ID NO: 2046) |
| 642 | RTTN (SEQ ID NO: 25) | TAGTGGTGTGGTAGTTT (SEQ ID NO: 2047) |
| 643 | RTTN (SEQ ID NO: 25) | TAGGACGTGTTTTCGG (SEQ ID NO: 2048) |
| 644 | RTTN (SEQ ID NO: 25) | AGGATGTGTTTTTGGG (SEQ ID NO: 2049) |
| 645 | SNAP25 (SEQ ID NO: 33) | ATACGGAATATCGTATTT (SEQ ID NO: 2052) |
| 646 | SNAP25 (SEQ ID NO: 33) | GTGTATATATGGAATATTGT (SEQ ID NO: |
| | | 2053) |
| 647 | SEQ ID NO: 26 (SEQ ID NO: 26) | TTAAGTATCGAGGCGT (SEQ ID NO: 2054) |
| 648 | SEQ ID NO: 26 (SEQ ID NO: 26) | TTTTAAGTATTGAGGTGT (SEQ ID NO: 2055) |
| 649 | SEQ ID NO: 26 (SEQ ID NO: 26) | AATTTTGGTCGTTTAGT (SEQ ID NO: 2056) |
| 650 | SEQ ID NO: 26 (SEQ ID NO: 26) | AAATTTTGGTTGTTTAGT (SEQ ID NO: 2057) |
| 651 | SEQ ID NO: 26 (SEQ ID NO: 26) | TTCGTATTGACGTTAAT (SEQ ID NO: 2058) |
| 652 | SEQ ID NO: 26 (SEQ ID NO: 26) | TTTGTATTGATGTTAATAGA (SEQ ID NO: |
| | | 2059) |
| 653 | GIRK2 (SEQ ID NO: 27) | AGTTGTTCGTAGGCGA (SEQ ID NO: 2060) |
| 654 | GIRK2 (SEQ ID NO: 27) | AGTTGTTTGTAGGTGA (SEQ ID NO: 2061) |
| 655 | GIRK2 (SEQ ID NO: 27) | AGTTGTTCGTAGGCGA (SEQ ID NO: 2060) |
| 656 | GIRK2 (SEQ ID NO: 27) | AGTTGTTTGTAGGTGA (SEQ ID NO: 2061) |
| 657 | GIRK2 (SEQ ID NO: 27) | TTATTTCGTTCGTAGTT (SEQ ID NO: 2062) |
| 658 | GIRK2 (SEQ ID NO: 27) | TTTGTTTGTAGTTAGGTA (SEQ ID NO: 2063) |
| 659 | GIRK2 (SEQ ID NO: 27) | TTAGTCGAAAGGCGAG (SEQ ID NO: 2064) |
| 660 | GIRK2 (SEQ ID NO: 27) | TAGTTGAAAGGTGAGG (SEQ ID NO: 2065) |
| 661 | SEQ ID NO: 28 (SEQ ID NO: 28) | ATTAGGCGAGTTTCGT (SEQ ID NO: 2066) |
| 662 | SEQ ID NO: 28 (SEQ ID NO: 28) | TTAGGTGAGTTTTGTTT (SEQ ID NO: 2067) |
| 663 | SEQ ID NO: 31 (SEQ ID NO: 31) | TTTACGTAGGGCGATT (SEQ ID NO: 2068) |
| 664 | SEQ ID NO: 31 (SEQ ID NO: 31) | ATTTTTATGTAGGGTGAT (SEQ ID NO: 2069) |
| 665 | SEQ ID NO: 31 (SEQ ID NO: 31) | GATACGGTTAGGCGGG (SEQ ID NO: 2070) |
| 666 | SEQ ID NO: 31 (SEQ ID NO: 31) | GATATGGTTAGGTGGG (SEQ ID NO: 2071) |
| 667 | SEQ ID NO: 31 (SEQ ID NO: 31) | GATACGGTTAGGCGGG (SEQ ID NO: 2070) |
| 668 | SEQ ID NO: 31 (SEQ ID NO: 31) | GATATGGTTAGGTGGG (SEQ ID NO: 2071) |
| 669 | SEQ ID NO: 31 (SEQ ID NO: 31) | TTCGGGCGTTTTATAT (SEQ ID NO: 2072) |
| 670 | SEQ ID NO: 31 (SEQ ID NO: 31) | GGTTTGGGTGTTTTATA (SEQ ID NO: 2073) |
| 671 | HOXB13 (SEQ ID NO: 34) | GTCGTTATTATTTCGAGG (SEQ ID NO: 2074) |
| 672 | HOXB13 (SEQ ID NO: 34) | GTTGTTATTATTTTGAGGA (SEQ ID NO: 2075) |
| 673 | HOXB13 (SEQ ID NO: 34) | TTCGTAGAATCGAAGT (SEQ ID NO: 2211) |
| 674 | HOXB13 (SEQ ID NO: 34) | TAATTTGTAGAATTGAAGT (SEQ ID NO: 2212) |
| 675 | HOXB13 (SEQ ID NO: 34) | TTACGATTGAGCGTAT (SEQ ID NO: 2213) |
| 676 | HOXB13 (SEQ ID NO: 34) | TATGATTGAGTGTATAGG (SEQ ID NO: 2214) |
| 677 | HOXB13 (SEQ ID NO: 34) | AAGTTAGCGGGTTCGT (SEQ ID NO: 2076) |
| 678 | HOXB13 (SEQ ID NO: 34) | AAGTTAGTGGGTTTGT (SEQ ID NO: 2077) |
| 679 | HOXB13 (SEQ ID NO: 34) | AAGTTAGCGGGTTCGT (SEQ ID NO: 2076) |
| 680 | HOXB13 (SEQ ID NO: 34) | AAGTTAGTGGGTTTGT (SEQ ID NO: 2077) |
| 681 | HOXB13 (SEQ ID NO: 34) | TTGGTCGCGTAGTAAA (SEQ ID NO: 2078) |
| 682 | HOXB13 (SEQ ID NO: 34) | TGGTTGTGTAGTAAAGT (SEQ ID NO: 2079) |
| 683 | (SEQ ID NO: 35) | GGAGGTGCGAATTTAA (SEQ ID NO: 2080) |
| 684 | (SEQ ID NO: 35) | GGGAGGTGTGAATTTA (SEQ ID NO: 2081) |
| 685 | (SEQ ID NO: 35) | AAATAGTCGTTTGGGA (SEQ ID NO: 2082) |
| 686 | (SEQ ID NO: 35) | AAATAGTTGTTTGGGAG (SEQ ID NO: 2083) |
| 687 | (SEQ ID NO: 35) | AGAAAATATACGAGATTTAT (SEQ ID NO: |
| | | 2084) |
| 688 | (SEQ ID NO: 35) | AGAAAATATATGAGATTTATT (SEQ ID NO: |
| | | 2085) |
| 689 | (SEQ ID NO: 35) | TAAAGACGGGAAGAGA (SEQ ID NO: 2086) |
| 690 | (SEQ ID NO: 35) | ATAAAGATGGGAAGAGA (SEQ ID NO: 2087) |
| 691 | MGC10561 (SEQ ID NO: 37) | ATATTTAGCGTAGTTATTT (SEQ ID NO: 2171) |
| 692 | MGC10561 (SEQ ID NO: 37) | TAGTATATTTAGTGTAGTTAT (SEQ ID NO: |
| | | 2172) |
| 693 | MGC10561 (SEQ ID NO: 37) | TTTTTTACGTTAAGGGG (SEQ ID NO: 2088) |
| 694 | MGC10561 (SEQ ID NO: 37) | TTTTTATGTTAAGGGGG (SEQ ID NO: 2089) |
| 695 | MGC10561 (SEQ ID NO: 37) | TTTGTTTTTCGAGTAGA (SEQ ID NO: 2090) |
| 696 | MGC10561 (SEQ ID NO: 37) | TGTTTTTTGAGTAGAGG (SEQ ID NO: 2091) |
| 697 | LMX1A (SEQ ID NO: 38) | GTCGGGTTTTTCGGAA (SEQ ID NO: 2092) |
| 698 | LMX1A (SEQ ID NO: 38) | GTTGGGTTTTTTGGAAG (SEQ ID NO: 2093) |
| 699 | LMX1A (SEQ ID NO: 38) | GTCGAGATTTTATCGAAA (SEQ ID NO: 2094) |
| 700 | LMX1A (SEQ ID NO: 38) | GTTGAGATTTTATTGAAAG (SEQ ID NO: 2095) |
| 701 | LMX1A (SEQ ID NO: 38) | TTCGTTTTTAACGTGG (SEQ ID NO: 2215) |
| 702 | LMX1A (SEQ ID NO: 38) | TTTGTTTTTAATGTGGTT (SEQ ID NO: 2216) |
| 703 | LMX1A (SEQ ID NO: 38) | AGTATTCGGGCGGGTA (SEQ ID NO: 2096) |
| 704 | LMX1A (SEQ ID NO: 38) | GTAGTATTTGGGTGGG (SEQ ID NO: 2097) |
| 705 | LMX1A (SEQ ID NO: 38) | AACGAAATTACGTGTAT (SEQ ID NO: 2098) |
| 706 | LMX1A (SEQ ID NO: 38) | TGAAATGAAATTATGTGTA (SEQ ID NO: 2099) |
| 707 | GS1 (SEQ ID NO: 40) | TGCGAGTTAGCGGTTA (SEQ ID NO: 2100) |
| 708 | GS1 (SEQ ID NO: 40) | TTGTGAGTTAGTGGTT (SEQ ID NO: 2101) |
| 709 | GS1 (SEQ ID NO: 40) | AGTTTCGAGGTTTTCGG (SEQ ID NO: 2102) |
| 710 | GS1 (SEQ ID NO: 40) | AAGTTTTGAGGTTTTTGG (SEQ ID NO: 2103) |
| 711 | TITF1 (SEQ ID NO: 41) | GTCGTGGGGATCGTAT (SEQ ID NO: 2104) |
| 712 | TITF1 (SEQ ID NO: 41) | GTTGTGGGGATTGTAT (SEQ ID NO: 2105) |
| 713 | TITF1 (SEQ ID NO: 41) | GTCGTGGGGATCGTAT (SEQ ID NO: 2104) |
| 714 | TITF1 (SEQ ID NO: 41) | GTTGTGGGGATTGTAT (SEQ ID NO: 2105) |
| 715 | TITF1 (SEQ ID NO: 41) | GGTTCGTTTAAGTTCGG (SEQ ID NO: 2106) |
| 716 | TITF1 (SEQ ID NO: 41) | GGTTTGTTTAAGTTTGG (SEQ ID NO: 2107) |
| 717 | TITF1 (SEQ ID NO: 41) | GGTTCGTTTAAGTTCGG (SEQ ID NO: 2106) |
| 718 | TITF1 (SEQ ID NO: 41) | GGTTTGTTTAAGTTTGG (SEQ ID NO: 2107) |
| 719 | TITF1 (SEQ ID NO: 41) | TTAGGTCGCGTTTGTA (SEQ ID NO: 2108) |
| 720 | TITF1 (SEQ ID NO: 41) | AGGTTGTGTTTGTAGA (SEQ ID NO: 2109) |
| 721 | TITF1 (SEQ ID NO: 41) | TATTTCGTTTTCGTAATT (SEQ ID NO: 2110) |
| 722 | TITF1 (SEQ ID NO: 41) | TTTGTTTTTGTAATTAGATT (SEQ ID NO: |
| | | 2111) |
| 723 | DDX51 (SEQ ID NO: 43) | AGATTTTCGGCGAGAT (SEQ ID NO: 2112) |
| 724 | DDX51 (SEQ ID NO: 43) | ATTTTTGGTGAGATAGG (SEQ ID NO: 2113) |
| 725 | DDX51 (SEQ ID NO: 43) | TACGTGTGGTTTTCGGTA (SEQ ID NO: 2114) |
| 726 | DDX51 (SEQ ID NO: 43) | TATGTGTGGTTTTTGGTA (SEQ ID NO: 2115) |
| 727 | DDX51 (SEQ ID NO: 43) | TACGTGTGGTTTTCGGTA (SEQ ID NO: 2114) |
| 728 | DDX51 (SEQ ID NO: 43) | TATGTGTGGTTTTTGGTA (SEQ ID NO: 2115) |
| 729 | DDX51 (SEQ ID NO: 43) | AACGTGCGGGGTTTTT (SEQ ID NO: 2116) |
| 730 | DDX51 (SEQ ID NO: 43) | TGAATGTGTGGGGTTT (SEQ ID NO: 2117) |
| 731 | SEQ ID NO: 46 (SEQ ID NO: 46) | GAGTCGGGTTATCGTT (SEQ ID NO: 2120) |
| 732 | SEQ ID NO: 46 (SEQ ID NO: 46) | GGAGTTGGGTTATTGT (SEQ ID NO: 2121) |
| 733 | SEQ ID NO: 46 (SEQ ID NO: 46) | TTACGGATGTTTCGGT (SEQ ID NO: 2122) |
| 734 | SEQ ID NO: 46 (SEQ ID NO: 46) | TTTATGGATGTTTTGGT (SEQ ID NO: 2123) |
| 735 | SEQ ID NO: 46 (SEQ ID NO: 46) | TGACGTATTTTCGGTT (SEQ ID NO: 2124) |
| 736 | SEQ ID NO: 46 (SEQ ID NO: 46) | GGTGATGTATTTTTGGT (SEQ ID NO: 2125) |
| 737 | SEQ ID NO: 46 (SEQ ID NO: 46) | ATAGTCGGAATCGTTG (SEQ ID NO: 2126) |
| 738 | SEQ ID NO: 46 (SEQ ID NO: 46) | TAGTTGGAATTGTTGTT (SEQ ID NO: 2127) |
| 739 | SEQ ID NO: 2 (SEQ ID NO: 2) | ATTGGGTTTCGCGTAGG (SEQ ID NO: 2128) |
| 740 | SEQ ID NO: 2 (SEQ ID NO: 2) | ATTGGGTTTTGTGTAGG (SEQ ID NO: 2129) |
| 741 | SEQ ID NO: 2 (SEQ ID NO: 2) | ATTGGGTTTCGCGTAGG (SEQ ID NO: 2128) |
| 742 | SEQ ID NO: 2 (SEQ ID NO: 2) | ATTGGGTTTTGTGTAGG (SEQ ID NO: 2129) |
| 743 | SEQ ID NO: 2 (SEQ ID NO: 2) | TAGTAGTCGGCGGGAG (SEQ ID NO: 2130) |
| 744 | SEQ ID NO: 2 (SEQ ID NO: 2) | TAGTAGTTGGTGGGAG (SEQ ID NO: 2131) |
| 745 | SEQ ID NO: 2 (SEQ ID NO: 2) | TAGTAGTCGGCGGGAG (SEQ ID NO: 2130) |
| 746 | SEQ ID NO: 2 (SEQ ID NO: 2) | TAGTAGTTGGTGGGAG (SEQ ID NO: 2131) |
| 747 | SEQ ID NO: 2 (SEQ ID NO: 2) | TGTCGTACGTTATGTT (SEQ ID NO: 2217) |
| 748 | SEQ ID NO: 2 (SEQ ID NO: 2) | GGTGTTGTATGTTATGT (SEQ ID NO: 2218) |
| 749 | SEQ ID NO: 2 (SEQ ID NO: 2) | TTGATTGGCGGACGAG (SEQ ID NO: 1706) |
| 750 | SEQ ID NO: 2 (SEQ ID NO: 2) | TTGATTGGTGGATGAG (SEQ ID NO: 1707) |
| 751 | SEQ ID NO: 2 (SEQ ID NO: 2) | TTGATTGGCGGACGAG (SEQ ID NO: 1706) |
| 752 | SEQ ID NO: 2 (SEQ ID NO: 2) | TTGATTGGTGGATGAG (SEQ ID NO: 1707) |
| 753 | SEQ ID NO: 3 (SEQ ID NO: 3) | TTGCGTTAATTCGGTA (SEQ ID NO: 2132) |
| 754 | SEQ ID NO: 3 (SEQ ID NO: 3) | AATTTGTGTTAATTTGGT (SEQ ID NO: 2133) |
| 755 | SEQ ID NO: 3 (SEQ ID NO: 3) | AGTCGGGAGAGCGAAA (SEQ ID NO: 2134) |
| 756 | SEQ ID NO: 3 (SEQ ID NO: 3) | AGTTGGGAGAGTGAAA (SEQ ID NO: 2135) |
| 757 | SEQ ID NO: 3 (SEQ ID NO: 3) | AGTCGGGAGAGCGAAA (SEQ ID NO: 2134) |
| 758 | SEQ ID NO: 3 (SEQ ID NO: 3) | AGTTGGGAGAGTGAAA (SEQ ID NO: 2135) |
| 759 | SEQ ID NO: 3 (SEQ ID NO: 3) | GGTCGAAGAGTCGGGA (SEQ ID NO: 2136) |
| 760 | SEQ ID NO: 3 (SEQ ID NO: 3) | GGTTGAAGAGTTGGGA (SEQ ID NO: 2137) |
| 761 | SEQ ID NO: 3 (SEQ ID NO: 3) | GGTCGAAGAGTCGGGA (SEQ ID NO: 2136) |
| 762 | SEQ ID NO: 3 (SEQ ID NO: 3) | GGTTGAAGAGTTGGGA (SEQ ID NO: 2137) |
| 763 | SEQ ID NO: 3 (SEQ ID NO: 3) | ATGTTAGCGGGTCGAA (SEQ ID NO: 2138) |
| 764 | SEQ ID NO: 3 (SEQ ID NO: 3) | ATGTTAGTGGGTTGAA (SEQ ID NO: 2139) |
| 765 | SEQ ID NO: 3 (SEQ ID NO: 3) | ATGTTAGCGGGTCGAA (SEQ ID NO: 2138) |
| 766 | SEQ ID NO: 3 (SEQ ID NO: 3) | ATGTTAGTGGGTTGAA (SEQ ID NO: 2139) |

TABLE 19
DCIS vs. benign breast conditions

| | | |
|---|---|---|
| No: | Gene | Oligo: |

| | | |
|---|---|---|
| 1 | SCGB3A1 (SEQ ID NO: 115) | TAGTGTTCGACGTTGT (SEQ ID NO: 1475) |
| 2 | SCGB3A1 (SEQ ID NO: 115) | TAGTGTTTGATGTTGTT (SEQ ID NO: 1476) |
| 3 | SASH1 (SEQ ID NO: 102) | TAGATTCGAGGTGCGG (SEQ ID NO: 1477) |
| 4 | SASH1 (SEQ ID NO: 102) | TAGATTTGAGGTGTGG (SEQ ID NO: 1478) |
| 5 | SASH1 (SEQ ID NO: 102) | TAGATTCGAGGTGCGG (SEQ ID NO: 1477) |
| 6 | SASH1 (SEQ ID NO: 102) | TAGATTTGAGGTGTGG (SEQ ID NO: 1478) |
| 7 | SASH1 (SEQ ID NO: 102) | ATTCGGTATTCGGGTAG (SEQ ID NO: 1479) |
| 8 | SASH1 (SEQ ID NO: 102) | ATTTGGTATTTGGGTAG (SEQ ID NO: 1480) |
| 9 | SASH1 (SEQ ID NO: 102) | ATTCGGTATTCGGGTAG (SEQ ID NO: 1479) |
| 10 | SASH1 (SEQ ID NO: 102) | ATTTGGTATTTGGGTAG (SEQ ID NO: 1480) |
| 11 | SASH1 (SEQ ID NO: 102) | AGTCGGAATCGGAGTT (SEQ ID NO: 1481) |
| 12 | SASH1 (SEQ ID NO: 102) | GTTGGAATTGGAGTTTA (SEQ ID NO: 1482) |
| 13 | ARH1/NOEY2 (SEQ ID NO: 97) | TAAAACGTTCGGTAGG (SEQ ID NO: 1485) |
| 14 | ARH1/NOEY2 (SEQ ID NO: 97) | TTTAAAATGTTTGGTAGG (SEQ ID NO: 1486) |
| 15 | ARH1/NOEY2 (SEQ ID NO: 97) | TGTATTCGTCGTTAGG (SEQ ID NO: 1487) |
| 16 | ARH1/NOEY2 (SEQ ID NO: 97) | AATGTATTTGTTGTTAGG (SEQ ID NO: 1488) |
| 17 | ARH1/NOEY2 (SEQ ID NO: 97) | TTAGACGGAGTTCGGA (SEQ ID NO: 1489) |
| 18 | ARH1/NOEY2 (SEQ ID NO: 97) | TAGATGGAGTTTGGAGA (SEQ ID NO: 1490) |
| 19 | ARH1/NOEY2 (SEQ ID NO: 97) | TAGACGTAGGCGTATT (SEQ ID NO: 1491) |
| 20 | ARH1/NOEY2 (SEQ ID NO: 97) | GGGTAGATGTAGGTGT (SEQ ID NO: 1492) |
| 21 | CCND2 (SEQ ID NO: 104) | TTAGGGTCGATCGTGT (SEQ ID NO: 1493) |
| 22 | CCND2 (SEQ ID NO: 104) | TAGGGTTGATTGTGTT (SEQ ID NO: 1494) |
| 23 | CCND2 (SEQ ID NO: 104) | TTATCGTAGTCGGTTT (SEQ ID NO: 1495) |
| 24 | CCND2 (SEQ ID NO: 104) | GATTTTATTGTAGTTGGT (SEQ ID NO: 1496) |
| 25 | CCND2 (SEQ ID NO: 104) | GAGTGAGGCGCGAAAT (SEQ ID NO: 1497) |
| 26 | CCND2 (SEQ ID NO: 104) | GAGTGAGGTGTGAAAT (SEQ ID NO: 1498) |
| 27 | CCND2 (SEQ ID NO: 104) | GAGTGAGGCGCGAAAT (SEQ ID NO: 1497) |
| 28 | CCND2 (SEQ ID NO: 104) | GAGTGAGGTGTGAAAT (SEQ ID NO: 1498) |
| 29 | CDKN1A (SEQ ID NO: 67) | ATTAGGGTCGCGTTGA (SEQ ID NO: 1501) |
| 30 | CDKN1A (SEQ ID NO: 67) | ATTAGGGTTGTGTTGA (SEQ ID NO: 1502) |
| 31 | CDKN1A (SEQ ID NO: 67) | ATTAGGGTCGCGTTGA (SEQ ID NO: 1501) |
| 32 | CDKN1A (SEQ ID NO: 67) | ATTAGGGTTGTGTTGA (SEQ ID NO: 1502) |
| 33 | CDKN2A (SEQ ID NO: 57) | GGCGTTGTTTAACGTAT (SEQ ID NO: 1503) |
| 34 | CDKN2A (SEQ ID NO: 57) | GGGTGTTGTTTAATGTA (SEQ ID NO: 1504) |
| 35 | CDKN2A (SEQ ID NO: 57) | AATAGTTACGGTCGGA (SEQ ID NO: 1505) |
| 36 | CDKN2A (SEQ ID NO: 57) | AGTTATGGTTGGAGGT (SEQ ID NO: 1506) |
| 37 | CDKN2A (SEQ ID NO: 57) | GTCGGAGGTCGATTTA (SEQ ID NO: 1507) |
| 38 | CDKN2A (SEQ ID NO: 57) | GGTTGGAGGTTGATTTA (SEQ ID NO: 1508) |
| 39 | EYA4 (SEQ ID NO: 58) | GGTATAAAATCGTAAATTTT (SEQ ID NO: |
| | | 1513) |
| 40 | EYA4 (SEQ ID NO: 58) | GGGTATAAAATTGTAAATTT (SEQ ID NO: |
| | | 1514) |
| 41 | EYA4 (SEQ ID NO: 58) | GTTTAGATACGAAATGTT (SEQ ID NO: 1517) |
| 42 | EYA4 (SEQ ID NO: 58) | GTTTAGATATGAAATGTTAT (SEQ ID NO: |
| | | 1518) |
| 43 | FHIT (SEQ ID NO: 76) | TTTAAGTATCGATTTTAGT (SEQ ID NO: 2183) |
| 44 | FHIT (SEQ ID NO: 76) | TAAGTATTGATTTTAGTTTTA (SEQ ID NO: |
| | | 2184) |
| 45 | FHIT (SEQ ID NO: 76) | GTTACGTTAGCGGGTT (SEQ ID NO: 1521) |
| 46 | FHIT (SEQ ID NO: 76) | GGTTATGTTAGTGGGT (SEQ ID NO: 1522) |
| 47 | FHIT (SEQ ID NO: 76) | TTCGGGGACGTTATAG (SEQ ID NO: 1523) |
| 48 | FHIT (SEQ ID NO: 76) | GGTTTGGGGATGTTAT (SEQ ID NO: 1524) |
| 49 | GSTP1 (SEQ ID NO: 59) | GGCGATTTCGGGGATT (SEQ ID NO: 1525) |
| 50 | GSTP1 (SEQ ID NO: 59) | GGTGATTTTGGGGATTT (SEQ ID NO: 1526) |
| 51 | GSTP1 (SEQ ID NO: 59) | GACGTTCGGGGTGTAG (SEQ ID NO: 1527) |
| 52 | GSTP1 (SEQ ID NO: 59) | GATGTTTGGGGTGTAG (SEQ ID NO: 1528) |
| 53 | GSTP1 (SEQ ID NO: 59) | GACGTTCGGGGTGTAG (SEQ ID NO: 1527) |
| 54 | GSTP1 (SEQ ID NO: 59) | GATGTTTGGGGTGTAG (SEQ ID NO: 1528) |
| 55 | GSTP1 (SEQ ID NO: 59) | AGTTCGCGGGATTTTT (SEQ ID NO: 1529) |
| 56 | GSTP1 (SEQ ID NO: 59) | GGAGTTTGTGGGATTT (SEQ ID NO: 1530) |
| 57 | GSTP1 (SEQ ID NO: 59) | AGTTTTCGTTATTAGTGA (SEQ ID NO: 1531) |
| 58 | GSTP1 (SEQ ID NO: 59) | TAGTTTTTGTTATTAGTGA (SEQ ID NO: 1532) |
| 59 | HIC1 (SEQ ID NO: 85) | TATCGAAGTTTTCGGG (SEQ ID NO: 1533) |
| 60 | HIC1 (SEQ ID NO: 85) | TATTGAAGTTTTTGGGT (SEQ ID NO: 1534) |
| 61 | MLH1 (SEQ ID NO: 89) | AGGCGGCGATAGATTA (SEQ ID NO: 1541) |
| 62 | MLH1 (SEQ ID NO: 89) | ATGAGGTGGTGATAGA (SEQ ID NO: 1542) |
| 63 | PGR (SEQ ID NO: 83) | TTTCGAGGTCGGATTT (SEQ ID NO: 1543) |
| 64 | PGR (SEQ ID NO: 83) | TTTGAGGTTGGATTTTT (SEQ ID NO: 1544) |
| 65 | PGR (SEQ ID NO: 83) | TTCGACGAAAAGACGT (SEQ ID NO: 2219) |
| 66 | PGR (SEQ ID NO: 83) | TTTTTGATGAAAAGATGT (SEQ ID NO: 2220) |
| 67 | PGR (SEQ ID NO: 83) | TTTTTTCGACGAAAAGA (SEQ ID NO: 1547) |
| 68 | PGR (SEQ ID NO: 83) | AGGATTTTTTTGATGAAA (SEQ ID NO: 1548) |
| 69 | SERPINB5 (SEQ ID NO: 68) | TTATTAACGTGTTTGAGA (SEQ ID NO: 1549) |
| 70 | SERPINB5 (SEQ ID NO: 68) | TTATTAATGTGTTTGAGAA (SEQ ID NO: 1550) |
| 71 | RARB (SEQ ID NO: 88) | ATGTCGAGAACGCGAG (SEQ ID NO: 1555) |
| 72 | RARB (SEQ ID NO: 88) | GGATGTTGAGAATGTGA (SEQ ID NO: 1556) |
| 73 | RARB (SEQ ID NO: 88) | AGCGATTCGAGTAGGG (SEQ ID NO: 1557) |
| 74 | RARB (SEQ ID NO: 88) | AGTGATTTGAGTAGGG (SEQ ID NO: 1558) |
| 75 | RARB (SEQ ID NO: 88) | AGCGATTCGAGTAGGG (SEQ ID NO: 1557) |
| 76 | RARB (SEQ ID NO: 88) | AGTGATTTGAGTAGGG (SEQ ID NO: 1558) |
| 77 | RARB (SEQ ID NO: 88) | TAGGATTCGGAACGTA (SEQ ID NO: 1559) |
| 78 | RARB (SEQ ID NO: 88) | GGTAGGATTTGGAATGT (SEQ ID NO: 1560) |
| 79 | TERT (SEQ ID NO: 92) | AGGTGTACGGTTTCGT (SEQ ID NO: 2187) |
| 80 | TERT (SEQ ID NO: 92) | AGGTGTATGGTTTTGT (SEQ ID NO: 2188) |
| 81 | TERT (SEQ ID NO: 92) | AGGTGTACGGTTTCGT (SEQ ID NO: 2187) |
| 82 | TERT (SEQ ID NO: 92) | AGGTGTATGGTTTTGT (SEQ ID NO: 2188) |
| 83 | TGFBR2 (SEQ ID NO: 93) | ATGGGGCGGACGAATA (SEQ ID NO: 1567) |
| 84 | TGFBR2 (SEQ ID NO: 93) | ATGGGGTGGATGAATA (SEQ ID NO: 1568) |
| 85 | TGFBR2 (SEQ ID NO: 93) | ATGGGGCGGACGAATA (SEQ ID NO: 1567) |
| 86 | TGFBR2 (SEQ ID NO: 93) | ATGGGGTGGATGAATA (SEQ ID NO: 1568) |
| 87 | THRB (SEQ ID NO: 106) | GGGCGGTTAAGTCGAG (SEQ ID NO: 1569) |
| 88 | THRB (SEQ ID NO: 106) | GGGTGGTTAAGTTGAG (SEQ ID NO: 1570) |
| 89 | THRB (SEQ ID NO: 106) | GGGCGGTTAAGTCGAG (SEQ ID NO: 1569) |
| 90 | THRB (SEQ ID NO: 106) | GGGTGGTTAAGTTGAG (SEQ ID NO: 1570) |
| 91 | TIMP3 (SEQ ID NO: 103) | TTATTAACGGAGGAAGG (SEQ ID NO: 1571) |
| 92 | TIMP3 (SEQ ID NO: 103) | TATTAATGGAGGAAGGG (SEQ ID NO: 1572) |
| 93 | TIMP3 (SEQ ID NO: 103) | TTCGTTATGTGTACGGAA (SEQ ID NO: 1573) |
| 94 | TIMP3 (SEQ ID NO: 103) | TTTGTTATGTGTATGGAA (SEQ ID NO: 1574) |
| 95 | TIMP3 (SEQ ID NO: 103) | TTCGTTATGTGTACGGAA (SEQ ID NO: 1573) |
| 96 | TIMP3 (SEQ ID NO: 103) | TTTGTTATGTGTATGGAA (SEQ ID NO: 1574) |
| 97 | TIMP3 (SEQ ID NO: 103) | GAGTATTTCGAGTTTGT (SEQ ID NO: 1575) |
| 98 | TIMP3 (SEQ ID NO: 103) | AGTATTTTGAGTTTGTATT (SEQ ID NO: 1576) |
| 99 | TIMP3 (SEQ ID NO: 103) | TAAGCGTTAATCGAGT (SEQ ID NO: 1577) |
| 100 | TIMP3 (SEQ ID NO: 103) | TAGGTAAGTGTTAATTGA (SEQ ID NO: 1578) |
| 101 | TP73 (SEQ ID NO: 86) | TTTCGGAGTTGCGAGT (SEQ ID NO: 1581) |
| 102 | TP73 (SEQ ID NO: 86) | TAGTTTTGGAGTTGTGA (SEQ ID NO: 1582) |
| 103 | CDH13 (SEQ ID NO: 70) | TAAAACGAGGGAGCGT (SEQ ID NO: 1583) |
| 104 | CDH13 (SEQ ID NO: 70) | AAAATGAGGGAGTGTT (SEQ ID NO: 1584) |
| 105 | CDH13 (SEQ ID NO: 70) | TAGTCGCGTGTATGAA (SEQ ID NO: 1585) |
| 106 | CDH13 (SEQ ID NO: 70) | TGTAGTTGTGTGTATGA (SEQ ID NO: 1586) |
| 107 | CDH13 (SEQ ID NO: 70) | ATGAAAACGTCGTCGG (SEQ ID NO: 1587) |
| 108 | CDH13 (SEQ ID NO: 70) | AATGAAAATGTTGTTGG (SEQ ID NO: 1588) |
| 109 | CDH13 (SEQ ID NO: 70) | TAGTCGAGAATTTCGT (SEQ ID NO: 1589) |
| 110 | CDH13 (SEQ ID NO: 70) | TGTAGTTGAGAATTTTGT (SEQ ID NO: 1590) |
| 111 | TMS1/ASC (SEQ ID NO: 84) | TTCGTTTCGGAGTCGA (SEQ ID NO: 1591) |
| 112 | TMS1/ASC (SEQ ID NO: 84) | TTTGTTTTGGAGTTGAT (SEQ ID NO: 1592) |
| 113 | APAF1 (SEQ ID NO: 82) | AGTAGCGTCGGGTTTT (SEQ ID NO: 1595) |
| 114 | APAF1 (SEQ ID NO: 82) | GAGTAGTGTTGGGTTT (SEQ ID NO: 1596) |
| 115 | SYK (SEQ ID NO: 60) | GAAGTTATCGCGTTGG (SEQ ID NO: 1597) |
| 116 | SYK (SEQ ID NO: 60) | AGAAGTTATTGTGTTGG (SEQ ID NO: 1598) |
| 117 | SYK (SEQ ID NO: 60) | GATCGATGCGGTTTAT (SEQ ID NO: 1599) |
| 118 | SYK (SEQ ID NO: 60) | GGGATTGATGTGGTTT (SEQ ID NO: 1600) |
| 119 | FABP3 (SEQ ID NO: 77) | GATGGGCGTATTAGTT (SEQ ID NO: 1605) |
| 120 | FABP3 (SEQ ID NO: 77) | GGGATGGGTGTATTAG (SEQ ID NO: 1606) |
| 121 | FABP3 (SEQ ID NO: 77) | GTGATGCGAGGGTTAT (SEQ ID NO: 1607) |
| 122 | FABP3 (SEQ ID NO: 77) | GTGATGTGAGGGTTAT (SEQ ID NO: 1608) |
| 123 | FABP3 (SEQ ID NO: 77) | GTGATGCGAGGGTTAT (SEQ ID NO: 1607) |
| 124 | FABP3 (SEQ ID NO: 77) | GTGATGTGAGGGTTAT (SEQ ID NO: 1608) |
| 125 | FABP3 (SEQ ID NO: 77) | TAAAGCGGTAGTTCGG (SEQ ID NO: 1609) |
| 126 | FABP3 (SEQ ID NO: 77) | AAGTGGTAGTTTGGGT (SEQ ID NO: 1610) |
| 127 | FABP3 (SEQ ID NO: 77) | TATTGGCGTTGACGTA (SEQ ID NO: 1611) |
| 128 | FABP3 (SEQ ID NO: 77) | TGGTGTTGATGTAGGT (SEQ ID NO: 1612) |
| 129 | RASSF1A (SEQ ID NO: 90) | TACGGGTATTTTCGCGT (SEQ ID NO: 1613) |
| 130 | RASSF1A (SEQ ID NO: 90) | ATATGGGTATTTTTGTGT (SEQ ID NO: 1614) |
| 131 | RASSF1A (SEQ ID NO: 90) | AGAGCGCGTTTAGTTT (SEQ ID NO: 1615) |
| 132 | RASSF1A (SEQ ID NO: 90) | GAGAGTGTGTTTAGTTT (SEQ ID NO: 1616) |
| 133 | RASSF1A (SEQ ID NO: 90) | AGTAAATCGGATTAGGA (SEQ ID NO: 1617) |
| 134 | RASSF1A (SEQ ID NO: 90) | AGTAAATTGGATTAGGAG (SEQ ID NO: 1618) |
| 135 | TWIST (SEQ ID NO: 100) | ATTGGGTCGTTGTAGA (SEQ ID NO: 1623) |
| 136 | TWIST (SEQ ID NO: 100) | ATTGGGTTGTTGTAGA (SEQ ID NO: 1624) |
| 137 | TWIST (SEQ ID NO: 100) | ATTGGGTCGTTGTAGA (SEQ ID NO: 1623) |
| 138 | TWIST (SEQ ID NO: 100) | ATTGGGTTGTTGTAGA (SEQ ID NO: 1624) |
| 139 | TWIST (SEQ ID NO: 100) | TAGGTCGGGACGTAAA (SEQ ID NO: 1625) |
| 140 | TWIST (SEQ ID NO: 100) | AGTAGGTTGGGATGTA (SEQ ID NO: 1626) |
| 141 | ESR2 (SEQ ID NO: 91) | TTTACGTGATCGAGTT (SEQ ID NO: 1631) |
| 142 | ESR2 (SEQ ID NO: 91) | AGTTTATGTGATTGAGTT (SEQ ID NO: 1632) |
| 143 | PLAU (SEQ ID NO: 62) | TATTTGTCGCGTTGAT (SEQ ID NO: 1633) |
| 144 | PLAU (SEQ ID NO: 62) | ATTTGTTGTGTTGATGA (SEQ ID NO: 1634) |
| 145 | PLAU (SEQ ID NO: 62) | TGTAATTCGGGGATTT (SEQ ID NO: 1635) |
| 146 | PLAU (SEQ ID NO: 62) | TTGTAATTTGGGGATTT (SEQ ID NO: 1636) |
| 147 | PLAU (SEQ ID NO: 62) | GAGCGTTGCGGAAGTA (SEQ ID NO: 1639) |
| 148 | PLAU (SEQ ID NO: 62) | GAGTGTTGTGGAAGTA (SEQ ID NO: 1640) |
| 149 | PLAU (SEQ ID NO: 62) | GAGCGTTGCGGAAGTA (SEQ ID NO: 1639) |
| 150 | PLAU (SEQ ID NO: 62) | GAGTGTTGTGGAAGTA (SEQ ID NO: 1640) |
| 151 | SLC19A1 (SEQ ID NO: 116) | GTCGTGCGGTTTTTAA (SEQ ID NO: 1663) |
| 152 | SLC19A1 (SEQ ID NO: 116) | GGTTGTGTGGTTTTTAA (SEQ ID NO: 1664) |
| 153 | SLC19A1 (SEQ ID NO: 116) | TTACGAAGGCGGTTTA (SEQ ID NO: 1665) |
| 154 | SLC19A1 (SEQ ID NO: 116) | TTTTATGAAGGTGGTTT (SEQ ID NO: 1666) |
| 155 | GJB2 (SEQ ID NO: 111) | GGATTTCGTCGGTATT (SEQ ID NO: 1667) |
| 156 | GJB2 (SEQ ID NO: 111) | GGGGATTTTGTTGGTA (SEQ ID NO: 1668) |
| 157 | HS3ST2 (SEQ ID NO: 113) | GAATCGGAGAGGCGAG (SEQ ID NO: 1671) |
| 158 | HS3ST2 (SEQ ID NO: 113) | AATTGGAGAGGTGAGG (SEQ ID NO: 1672) |
| 159 | HS3ST2 (SEQ ID NO: 113) | GGGTAATCGTTTGGTA (SEQ ID NO: 1673) |
| 160 | HS3ST2 (SEQ ID NO: 113) | GGGTAATTGTTTGGTAT (SEQ ID NO: 1674) |
| 161 | PRDM2 (SEQ ID NO: 114) | TGTAGAGACGACGATT (SEQ ID NO: 1675) |
| 162 | PRDM2 (SEQ ID NO: 114) | ATTGTAGAGATGATGATT (SEQ ID NO: 1676) |
| 163 | S100A7 (SEQ ID NO: 96) | TATAGTCGGGGTGATA (SEQ ID NO: 1689) |
| 164 | S100A7 (SEQ ID NO: 96) | TTTATAGTTGGGGTGAT (SEQ ID NO: 1690) |
| 165 | APC (SEQ ID NO: 65) | GATTCGTATTTCGTAGT (SEQ ID NO: 1695) |
| 166 | APC (SEQ ID NO: 65) | GATTCGTATTTCGTAGT (SEQ ID NO: 1695) |
| 167 | APC (SEQ ID NO: 65) | AGCGTTTTGGTTCGTAT (SEQ ID NO: 1696) |
| 168 | APC (SEQ ID NO: 65) | AGTGTTTTGGTTTGTAT (SEQ ID NO: 1697) |
| 169 | APC (SEQ ID NO: 65) | AGCGTTTTGGTTCGTAT (SEQ ID NO: 1696) |
| 170 | APC (SEQ ID NO: 65) | AGTGTTTTGGTTTGTAT (SEQ ID NO: 1697) |
| 171 | APC (SEQ ID NO: 65) | TTAATCGGCGGGTTTT (SEQ ID NO: 1698) |
| 172 | APC (SEQ ID NO: 65) | AGTTAATTGGTGGGTT (SEQ ID NO: 1699) |
| 173 | APC (SEQ ID NO: 65) | ATTTTCGAGTTCGGTA (SEQ ID NO: 1700) |
| 174 | APC (SEQ ID NO: 65) | TTTTTGAGTTTGGTAGT (SEQ ID NO: 1701) |
| 175 | SEQ ID NO: 2 (SEQ ID NO: 2) | TTGATTGGCGGACGAG (SEQ ID NO: 1706) |
| 176 | SEQ ID NO: 2 (SEQ ID NO: 2) | TTGATTGGTGGATGAG (SEQ ID NO: 1707) |
| 177 | SEQ ID NO: 2 (SEQ ID NO: 2) | TTGATTGGCGGACGAG (SEQ ID NO: 1706) |
| 178 | SEQ ID NO: 2 (SEQ ID NO: 2) | TTGATTGGTGGATGAG (SEQ ID NO: 1707) |
| 179 | IGFBP7 (SEQ ID NO: 94) | TAGTCGCGGAATGTTA (SEQ ID NO: 1708) |
| 180 | IGFBP7 (SEQ ID NO: 94) | TTGGTAGTTGTGGAAT (SEQ ID NO: 1709) |
| 181 | IGFBP7 (SEQ ID NO: 94) | ATTTTTTCGCGGGTAT (SEQ ID NO: 1710) |
| 182 | IGFBP7 (SEQ ID NO: 94) | TTTTTGTGGGTATTTTAG (SEQ ID NO: 1711) |
| 183 | IGFBP7 (SEQ ID NO: 94) | GGTATATTCGACGGGG (SEQ ID NO: 1712) |
| 184 | IGFBP7 (SEQ ID NO: 94) | GGGTATATTTGATGGGG (SEQ ID NO: 1713) |
| 185 | SOD2 (SEQ ID NO: 105) | TATTAGGCGGTTGCGG (SEQ ID NO: 1720) |
| 186 | SOD2 (SEQ ID NO: 105) | TATTAGGTGGTTGTGG (SEQ ID NO: 1721) |
| 187 | SOD2 (SEQ ID NO: 105) | TATTAGGCGGTTGCGG (SEQ ID NO: 1720) |
| 188 | SOD2 (SEQ ID NO: 105) | TATTAGGTGGTTGTGG (SEQ ID NO: 1721) |
| 189 | THBS1 (SEQ ID NO: 81) | TAAAGGGGCGTTCGTA (SEQ ID NO: 1726) |
| 190 | THBS1 (SEQ ID NO: 81) | AAGGGGTGTTTGTATT (SEQ ID NO: 1727) |
| 191 | THBS1 (SEQ ID NO: 81) | GGTTAGTTCGGGCGTA (SEQ ID NO: 1728) |
| 192 | THBS1 (SEQ ID NO: 81) | GGTTAGTTTGGGTGTA (SEQ ID NO: 1729) |
| 193 | THBS1 (SEQ ID NO: 81) | GGTTAGTTCGGGCGTA (SEQ ID NO: 1728) |
| 194 | THBS1 (SEQ ID NO: 81) | GGTTAGTTTGGGTGTA (SEQ ID NO: 1729) |
| 195 | ESR1 (SEQ ID NO: 75) | AAATCGGCGGGTTATT (SEQ ID NO: 1732) |
| 196 | ESR1 (SEQ ID NO: 75) | AGAAATTGGTGGGTTA (SEQ ID NO: 1733) |
| 197 | ESR1 (SEQ ID NO: 75) | AGTTGCGGACGGTTTA (SEQ ID NO: 1734) |
| 198 | ESR1 (SEQ ID NO: 75) | AGTTGTGGATGGTTTA (SEQ ID NO: 1735) |
| 199 | ESR1 (SEQ ID NO: 75) | AGTTGCGGACGGTTTA (SEQ ID NO: 1734) |
| 200 | ESR1 (SEQ ID NO: 75) | AGTTGTGGATGGTTTA (SEQ ID NO: 1735) |
| 201 | CASP8 (SEQ ID NO: 71) | TGTATTCGAGGCGGTA (SEQ ID NO: 1740) |
| 202 | CASP8 (SEQ ID NO: 71) | TTGTATTTGAGGTGGT (SEQ ID NO: 1741) |
| 203 | HOXA5 (SEQ ID NO: 78) | TTCGAGTTCGGTTGAA (SEQ ID NO: 1746) |
| 204 | HOXA5 (SEQ ID NO: 78) | GTTTGAGTTTGGTTGAA (SEQ ID NO: 1747) |
| 205 | HOXA5 (SEQ ID NO: 78) | TAGTTTTCGGTCGGAA (SEQ ID NO: 1748) |
| 206 | HOXA5 (SEQ ID NO: 78) | TAGTTTTTGGTTGGAAG (SEQ ID NO: 1749) |
| 207 | HOXA5 (SEQ ID NO: 78) | TAATTCGATTTCGGTTT (SEQ ID NO: 1750) |
| 208 | HOXA5 (SEQ ID NO: 78) | TTTAATTTGATTTTGGTTT (SEQ ID NO: 1751) |
| 209 | HOXA5 (SEQ ID NO: 78) | ATCGGTAGTTGACGGTT (SEQ ID NO: 1752) |
| 210 | HOXA5 (SEQ ID NO: 78) | ATTGGTAGTTGATGGTT (SEQ ID NO: 1753) |
| 211 | HOXA5 (SEQ ID NO: 78) | ATCGGTAGTTGACGGTT (SEQ ID NO: 1752) |
| 212 | HOXA5 (SEQ ID NO: 78) | ATTGGTAGTTGATGGTT (SEQ ID NO: 1753) |
| 213 | RARA (SEQ ID NO: 108) | GAATTAGTATCGGTTTTT (SEQ ID NO: 1756) |
| 214 | RARA (SEQ ID NO: 108) | ATTAGTATTGGTTTTTGG (SEQ ID NO: 1757) |
| 215 | SNCG (SEQ ID NO: 73) | TGCGGTAGTATTCGAGT (SEQ ID NO: 1758) |
| 216 | SNCG (SEQ ID NO: 73) | TGTGGTAGTATTTGAGT (SEQ ID NO: 1759) |
| 217 | SNCG (SEQ ID NO: 73) | TGCGGTAGTATTCGAGT (SEQ ID NO: 1758) |
| 218 | SNCG (SEQ ID NO: 73) | TGTGGTAGTATTTGAGT (SEQ ID NO: 1759) |
| 219 | SNCG (SEQ ID NO: 73) | TATCGGGGATAGTCGTT (SEQ ID NO: 2199) |
| 220 | SNCG (SEQ ID NO: 73) | TATTGGGGATAGTTGTT (SEQ ID NO: 2200) |
| 221 | SNCG (SEQ ID NO: 73) | TATCGGGGATAGTCGTT (SEQ ID NO: 2199) |
| 222 | SNCG (SEQ ID NO: 73) | TATTGGGGATAGTTGTT (SEQ ID NO: 2200) |
| 223 | SNCG (SEQ ID NO: 73) | TATCGGCGTTAATAGG (SEQ ID NO: 2201) |
| 224 | SNCG (SEQ ID NO: 73) | TATTGGTGTTAATAGGAG (SEQ ID NO: 2202) |
| 225 | SLIT2 (SEQ ID NO: 112) | TTCGATAGTTAACGATG (SEQ ID NO: 1772) |
| 226 | SLIT2 (SEQ ID NO: 112) | TTTGATAGTTAATGATGGT (SEQ ID NO: 1773) |
| 227 | SLIT2 (SEQ ID NO: 112) | ATTTCGTCGTAGTTTG (SEQ ID NO: 1774) |
| 228 | SLIT2 (SEQ ID NO: 112) | TTTTGTTGTAGTTTGGA (SEQ ID NO: 1775) |
| 229 | SLIT2 (SEQ ID NO: 112) | TAGCGGGTTCGTAGTA (SEQ ID NO: 1776) |
| 230 | SLIT2 (SEQ ID NO: 112) | TTAGTGGGTTTGTAGTA (SEQ ID NO: 1777) |
| 231 | SLIT2 (SEQ ID NO: 112) | AAGGCGCGGAAGTTTA (SEQ ID NO: 1778) |
| 232 | SLIT2 (SEQ ID NO: 112) | AAGGTGTGGAAGTTTA (SEQ ID NO: 1779) |
| 233 | SLIT2 (SEQ ID NO: 112) | AAGGCGCGGAAGTTTA (SEQ ID NO: 1778) |
| 234 | SLIT2 (SEQ ID NO: 112) | AAGGTGTGGAAGTTTA (SEQ ID NO: 1779) |
| 235 | IGSF4 (SEQ ID NO: 74) | AGGTAGATCGAGGAGG (SEQ ID NO: 1780) |
| 236 | IGSF4 (SEQ ID NO: 74) | AGGTAGATTGAGGAGG (SEQ ID NO: 1781) |
| 237 | IGSF4 (SEQ ID NO: 74) | AGGTAGATCGAGGAGG (SEQ ID NO: 1780) |
| 238 | IGSF4 (SEQ ID NO: 74) | AGGTAGATTGAGGAGG (SEQ ID NO: 1781) |
| 239 | IGSF4 (SEQ ID NO: 74) | TAGGTTTTCGGATTGA (SEQ ID NO: 1784) |
| 240 | IGSF4 (SEQ ID NO: 74) | GTAGGTTTTTGGATTGA (SEQ ID NO: 1785) |
| 241 | MCT1 (SEQ ID NO: 101) | ATTTTACGTAGGCGTT (SEQ ID NO: 1786) |
| 242 | MCT1 (SEQ ID NO: 101) | GATTTTATGTAGGTGTTT (SEQ ID NO: 1787) |
| 243 | MCT1 (SEQ ID NO: 101) | AGTTAGTCGCGTTTTA (SEQ ID NO: 1788) |
| 244 | MCT1 (SEQ ID NO: 101) | AGAGTTAGTTGTGTTTTA (SEQ ID NO: 1789) |
| 245 | MCT1 (SEQ ID NO: 101) | TATACGAGGAAGGTCGG (SEQ ID NO: 1790) |
| 246 | MCT1 (SEQ ID NO: 101) | TATATGAGGAAGGTTGG (SEQ ID NO: 1791) |
| 247 | MCT1 (SEQ ID NO: 101) | TATACGAGGAAGGTCGG (SEQ ID NO: 1790) |
| 248 | MCT1 (SEQ ID NO: 101) | TATATGAGGAAGGTTGG (SEQ ID NO: 1791) |
| 249 | SEQ ID NO: 6 (SEQ ID NO: 6) | AAGTTTATCGGCGTTT (SEQ ID NO: 1792) |
| 250 | SEQ ID NO: 6 (SEQ ID NO: 6) | AGAAGTTTATTGGTGTTT (SEQ ID NO: 1793) |
| 251 | SEQ ID NO: 6 (SEQ ID NO: 6) | ATTTCGGAATTTAAGCGT (SEQ ID NO: 1794) |
| 252 | SEQ ID NO: 6 (SEQ ID NO: 6) | TTTTGGAATTTAAGTGTT (SEQ ID NO: 1795) |
| 253 | SEQ ID NO: 6 (SEQ ID NO: 6) | TAATTTCGGACGCGGA (SEQ ID NO: 1796) |
| 254 | SEQ ID NO: 6 (SEQ ID NO: 6) | TTTTGGATGTGGAGGA (SEQ ID NO: 1797) |
| 255 | SEQ ID NO: 6 (SEQ ID NO: 6) | TTACGGTGAAGGCGGA (SEQ ID NO: 1798) |
| 256 | SEQ ID NO: 6 (SEQ ID NO: 6) | TTATGGTGAAGGTGGA (SEQ ID NO: 1799) |
| 257 | SEQ ID NO: 6 (SEQ ID NO: 6) | TTACGGTGAAGGCGGA (SEQ ID NO: 1798) |
| 258 | SEQ ID NO: 6 (SEQ ID NO: 6) | TTATGGTGAAGGTGGA (SEQ ID NO: 1799) |
| 259 | SEQ ID NO: 6 (SEQ ID NO: 6) | TTTCGGTTTTCGTTAAT (SEQ ID NO: 1800) |
| 260 | SEQ ID NO: 6 (SEQ ID NO: 6) | TTTGGTTTTTGTTAATTTAG (SEQ ID NO: |
| | | 1801) |
| 261 | SEQ ID NO: 6 (SEQ ID NO: 6) | TGTGCGAAGTTAACGT (SEQ ID NO: 1802) |
| 262 | SEQ ID NO: 6 (SEQ ID NO: 6) | TTGTGTGAAGTTAATGT (SEQ ID NO: 1803) |
| 263 | SEQ ID NO: 8 (SEQ ID NO: 8) | ATAAAGCGGGGTTTTA (SEQ ID NO: 1804) |
| 264 | SEQ ID NO: 8 (SEQ ID NO: 8) | GGATAAAGTGGGGTTT (SEQ ID NO: 1805) |
| 265 | PROSTAGLANDIN E2 RECEPTOR, EP4 | AGTGTATCGTTTTTCGG (SEQ ID NO: 1812) |
| | SUBTYPE (PROSTANOID EP4 RECEPTOR) | |
| | (PGE RECEPTOR, EP4 SUBTYPE) (SEQ | |
| | ID NO: 10) | |
| 266 | PROSTAGLANDIN E2 RECEPTOR, EP4 | TAGTGTATTGTTTTTTGG (SEQ ID NO: 1813) |
| | SUBTYPE (PROSTANOID EP4 RECEPTOR) | |
| | (PGE RECEPTOR, EP4 SUBTYPE) (SEQ | |
| | ID NO: 10) | |
| 267 | PROSTAGLANDIN E2 RECEPTOR, EP4 | TGCGTATCGTTAGTTA (SEQ ID NO: 1814) |
| | SUBTYPE (PROSTANOID EP4 RECEPTOR) | |
| | (PGE RECEPTOR, EP4 SUBTYPE) (SEQ | |
| | ID NO: 10) | |
| 268 | PROSTAGLANDIN E2 RECEPTOR, EP4 | AGGTTGTGTATTGTTAG (SEQ ID NO: 1815) |
| | SUBTYPE (PROSTANOID EP4 RECEPTOR) | |
| | (PGE RECEPTOR, EP4 SUBTYPE) (SEQ | |
| | ID NO: 10) | |
| 269 | PROSTAGLANDIN E2 RECEPTOR, EP4 | ATTATTTCGGCGGTGA (SEQ ID NO: 1816) |
| | SUBTYPE (PROSTANOID EP4 RECEPTOR) | |
| | (PGE RECEPTOR, EP4 SUBTYPE) (SEQ | |
| | ID NO: 10) | |
| 270 | PROSTAGLANDIN E2 RECEPTOR, EP4 | GATTATTTTGGTGGTGA (SEQ ID NO: 1817) |
| | SUBTYPE (PROSTANOID EP4 RECEPTOR) | |
| | (PGE RECEPTOR, EP4 SUBTYPE) (SEQ | |
| | ID NO: 10) | |
| 271 | PROSTAGLANDIN E2 RECEPTOR, EP4 | TAAGTCGCGTAAGGAG (SEQ ID NO: 1818) |
| | SUBTYPE (PROSTANOID EP4 RECEPTOR) | |
| | (PGE RECEPTOR, EP4 SUBTYPE) (SEQ | |
| | ID NO: 10) | |
| 272 | PROSTAGLANDIN E2 RECEPTOR, EP4 | AAGTTGTGTAAGGAGTA (SEQ ID NO: 1819) |
| | SUBTYPE (PROSTANOID EP4 RECEPTOR) | |
| | (PGE RECEPTOR, EP4 SUBTYPE) (SEQ | |
| | ID NO: 10) | |
| 273 | PROSTAGLANDIN E2 RECEPTOR, EP4 | GTATCGCGAGTTTGGA (SEQ ID NO: 1820) |
| | SUBTYPE (PROSTANOID EP4 RECEPTOR) | |
| | (PGE RECEPTOR, EP4 SUBTYPE) (SEQ | |
| | ID NO: 10) | |
| 274 | PROSTAGLANDIN E2 RECEPTOR, EP4 | GTATTGTGAGTTTGGAG (SEQ ID NO: 1821) |
| | SUBTYPE (PROSTANOID EP4 RECEPTOR) | |
| | (PGE RECEPTOR, EP4 SUBTYPE) (SEQ | |
| | ID NO: 10) | |
| 275 | SEQ ID NO: 51 (SEQ ID NO: 51) | GTCGGGGTCGATTCGA (SEQ ID NO: 1822) |
| 276 | SEQ ID NO: 51 (SEQ ID NO: 51) | GTTGGGGTTGATTTGAT (SEQ ID NO: 1823) |
| 277 | SEQ ID NO: 51 (SEQ ID NO: 51) | AGGATTCGTTTGCGTT (SEQ ID NO: 1824) |
| 278 | SEQ ID NO: 51 (SEQ ID NO: 51) | AAGGATTTGTTTGTGTT (SEQ ID NO: 1825) |
| 279 | MGC34831 (SEQ ID NO: 52) | ATTAGCGTTTGGCGTT (SEQ ID NO: 1826) |
| 280 | MGC34831 (SEQ ID NO: 52) | AATTAGTGTTTGGTGTT (SEQ ID NO: 1827) |
| 281 | MGC34831 (SEQ ID NO: 52) | GTTTAGCGACGGTCGT (SEQ ID NO: 1828) |
| 282 | MGC34831 (SEQ ID NO: 52) | TGTTTAGTGATGGTTGT (SEQ ID NO: 1829) |
| 283 | SEQ ID NO: 54 (SEQ ID NO: 54) | TGTGTAGCGGCGATTA (SEQ ID NO: 1830) |
| 284 | SEQ ID NO: 54 (SEQ ID NO: 54) | GTGTGTAGTGGTGATT (SEQ ID NO: 1831) |
| 285 | SEQ ID NO: 54 (SEQ ID NO: 54) | ATTAGCGTTTGGTCGG (SEQ ID NO: 1832) |
| 286 | SEQ ID NO: 54 (SEQ ID NO: 54) | ATTAGTGTTTGGTTGGG (SEQ ID NO: 1833) |
| 287 | PDLIM1 (SEQ ID NO: 55) | TAGGTCGCGTAGTCGT (SEQ ID NO: 1834) |
| 288 | PDLIM1 (SEQ ID NO: 55) | TTAGGTTGTGTAGTTGT (SEQ ID NO: 1835) |
| 289 | DKK3 (SEQ ID NO: 24) | ATTCGTTTTAGTTCGAG (SEQ ID NO: 1842) |
| 290 | DKK3 (SEQ ID NO: 24) | ATTTGTTTTAGTTTGAGT (SEQ ID NO: 1843) |
| 291 | DKK3 (SEQ ID NO: 24) | TTCGATCGTTTTAGGA (SEQ ID NO: 1844) |
| 292 | DKK3 (SEQ ID NO: 24) | AGTTTTGATTGTTTTAGG (SEQ ID NO: 1845) |
| 293 | DKK3 (SEQ ID NO: 24) | GAAAAGACGCGATTTT (SEQ ID NO: 1848) |
| 294 | DKK3 (SEQ ID NO: 24) | GAAAAGATGTGATTTTATT (SEQ ID NO: 1849) |
| 295 | SEQ ID NO: 29 (SEQ ID NO: 29) | TTGATGCGGAGTTCGA (SEQ ID NO: 1852) |
| 296 | SEQ ID NO: 29 (SEQ ID NO: 29) | TTGATGTGGAGTTTGA (SEQ ID NO: 1853) |
| 297 | SEQ ID NO: 29 (SEQ ID NO: 29) | TTGATGCGGAGTTCGA (SEQ ID NO: 1852) |
| 298 | SEQ ID NO: 29 (SEQ ID NO: 29) | TTGATGTGGAGTTTGA (SEQ ID NO: 1853) |
| 299 | SEQ ID NO: 29 (SEQ ID NO: 29) | TTCGAAGCGTGTATTA (SEQ ID NO: 2155) |
| 300 | SEQ ID NO: 29 (SEQ ID NO: 29) | GGGTTTGAAGTGTGTA (SEQ ID NO: 2156) |
| 301 | SEQ ID NO: 29 (SEQ ID NO: 29) | TAGGAACGGTAGGCGG (SEQ ID NO: 1854) |
| 302 | SEQ ID NO: 29 (SEQ ID NO: 29) | TAGGAATGGTAGGTGG (SEQ ID NO: 1855) |
| 303 | SEQ ID NO: 29 (SEQ ID NO: 29) | TAGGAACGGTAGGCGG (SEQ ID NO: 1854) |
| 304 | SEQ ID NO: 29 (SEQ ID NO: 29) | TAGGAATGGTAGGTGG (SEQ ID NO: 1855) |
| 305 | SEQ ID NO: 29 (SEQ ID NO: 29) | GTCGGAGGCGTTTGAG (SEQ ID NO: 1856) |
| 306 | SEQ ID NO: 29 (SEQ ID NO: 29) | GTTGGAGGTGTTTGAGA (SEQ ID NO: 1857) |
| 307 | ARL7 (SEQ ID NO: 30) | TAGATTTCGTAGTTTTTTA (SEQ ID NO: 1858) |
| 308 | ARL7 (SEQ ID NO: 30) | TAGATTTTGTAGTTTTTTAA (SEQ ID NO: |
| | | 1859) |
| 309 | ARL7 (SEQ ID NO: 30) | TGGGTACGTTTACGGT (SEQ ID NO: 1860) |
| 310 | ARL7 (SEQ ID NO: 30) | TGGGTATGTTTATGGTT (SEQ ID NO: 1861) |
| 311 | ARL7 (SEQ ID NO: 30) | GAAGAAATCGTTTTTGT (SEQ ID NO: 1862) |
| 312 | ARL7 (SEQ ID NO: 30) | GAAGAAATTGTTTTTGTT (SEQ ID NO: 1863) |
| 313 | ARL7 (SEQ ID NO: 30) | TAGTAGGATCGGTTTTT (SEQ ID NO: 1864) |
| 314 | ARL7 (SEQ ID NO: 30) | ATAGTAGGATTGGTTTTT (SEQ ID NO: 1865) |
| 315 | SEQ ID NO: 31 (SEQ ID NO: 31) | AACGTTGCGTTGGGTA (SEQ ID NO: 1866) |
| 316 | SEQ ID NO: 31 (SEQ ID NO: 31) | AATGTTGTGTTGGGTAA (SEQ ID NO: 1867) |
| 317 | SEQ ID NO: 31 (SEQ ID NO: 31) | TAGCGTTTCGTGGTTA (SEQ ID NO: 1868) |
| 318 | SEQ ID NO: 31 (SEQ ID NO: 31) | GTAGTGTTTTGTGGTTA (SEQ ID NO: 1869) |
| 319 | THH (SEQ ID NO: 32) | GTTCGTTGGCGTAAAT (SEQ ID NO: 1872) |
| 320 | THH (SEQ ID NO: 32) | GGTTTGTTGGTGTAAAT (SEQ ID NO: 1873) |
| 321 | (SEQ ID NO: 36) | GGACGTTGCGATTGTA (SEQ ID NO: 2161) |
| 322 | (SEQ ID NO: 36) | GATGTTGTGATTGTAGT (SEQ ID NO: 2162) |
| 323 | SENP3 (SEQ ID NO: 39) | TATTCGGATCGGGTTT (SEQ ID NO: 1876) |
| 324 | SENP3 (SEQ ID NO: 39) | TTTATTTGGATTGGGTT (SEQ ID NO: 1877) |
| 325 | SENP3 (SEQ ID NO: 39) | TAGTCGAAAGTAGGACGT (SEQ ID NO: 1878) |
| 326 | SENP3 (SEQ ID NO: 39) | TAGTTGAAAGTAGGATGT (SEQ ID NO: 1879) |
| 327 | SENP3 (SEQ ID NO: 39) | TAGTCGAAAGTAGGACGT (SEQ ID NO: 1878) |
| 328 | SENP3 (SEQ ID NO: 39) | TAGTTGAAAGTAGGATGT (SEQ ID NO: 1879) |
| 329 | SENP3 (SEQ ID NO: 39) | AGTTATCGTTAGGAGGG (SEQ ID NO: 1882) |
| 330 | SENP3 (SEQ ID NO: 39) | AGTTATTGTTAGGAGGG (SEQ ID NO: 1883) |
| 331 | SENP3 (SEQ ID NO: 39) | AGTTATCGTTAGGAGGG (SEQ ID NO: 1882) |
| 332 | SENP3 (SEQ ID NO: 39) | AGTTATTGTTAGGAGGG (SEQ ID NO: 1883) |
| 333 | SEQ ID NO: 42 (SEQ ID NO: 42) | GAGTCGGGTTGCGATG (SEQ ID NO: 1884) |
| 334 | SEQ ID NO: 42 (SEQ ID NO: 42) | GGAGTTGGGTTGTGAT (SEQ ID NO: 1885) |
| 335 | SEQ ID NO: 42 (SEQ ID NO: 42) | ATGGGTTGCGATTTTTA (SEQ ID NO: 1886) |
| 336 | SEQ ID NO: 42 (SEQ ID NO: 42) | ATGGGTTGTGATTTTTA (SEQ ID NO: 1887) |
| 337 | SEQ ID NO: 42 (SEQ ID NO: 42) | ATGGGTTGCGATTTTTA (SEQ ID NO: 1886) |
| 338 | SEQ ID NO: 42 (SEQ ID NO: 42) | ATGGGTTGTGATTTTTA (SEQ ID NO: 1887) |
| 339 | (SEQ ID NO: 117) | TAGCGGTTTTTTAGCGTA (SEQ ID NO: 1888) |
| 340 | (SEQ ID NO: 117) | AGTGGTTTTTTAGTGTAT (SEQ ID NO: 1889) |
| 341 | (SEQ ID NO: 117) | AGATGCGCGGGTAGAT (SEQ ID NO: 1890) |
| 342 | (SEQ ID NO: 117) | AGATGTGTGGGTAGAT (SEQ ID NO: 1891) |
| 343 | (SEQ ID NO: 117) | AGATGCGCGGGTAGAT (SEQ ID NO: 1890) |
| 344 | (SEQ ID NO: 117) | AGATGTGTGGGTAGAT (SEQ ID NO: 1891) |
| 345 | (SEQ ID NO: 117) | AGATAGTTCGTATTCGT (SEQ ID NO: 1892) |
| 346 | (SEQ ID NO: 117) | GTAGATAGTTTGTATTTGT (SEQ ID NO: 1893) |
| 347 | (SEQ ID NO: 117) | TTTGTTCGTAACGTTT (SEQ ID NO: 1894) |
| 348 | (SEQ ID NO: 117) | TGTTTGTAATGTTTAGAG (SEQ ID NO: 1895) |
| 349 | O60279 (SEQ ID NO: 47) | GGACGGCGGAAAATTA (SEQ ID NO: 1902) |
| 350 | O60279 (SEQ ID NO: 47) | AGGGATGGTGGAAAAT (SEQ ID NO: 1903) |
| 351 | SEQ ID NO: 48 (SEQ ID NO: 48) | TATTTGGCGATTCGGA (SEQ ID NO: 1904) |
| 352 | SEQ ID NO: 48 (SEQ ID NO: 48) | TGGTGATTTGGAGATT (SEQ ID NO: 1905) |
| 353 | SEQ ID NO: 48 (SEQ ID NO: 48) | TAGGGTTACGTGTCGG (SEQ ID NO: 1906) |
| 354 | SEQ ID NO: 48 (SEQ ID NO: 48) | TAGGGTTATGTGTTGG (SEQ ID NO: 1907) |
| 355 | SEQ ID NO: 48 (SEQ ID NO: 48) | TAGGGTTACGTGTCGG (SEQ ID NO: 1906) |
| 356 | SEQ ID NO: 48 (SEQ ID NO: 48) | TAGGGTTATGTGTTGG (SEQ ID NO: 1907) |
| 357 | SEQ ID NO: 48 (SEQ ID NO: 48) | AAAATCGTATGCGTGT (SEQ ID NO: 1910) |
| 358 | SEQ ID NO: 48 (SEQ ID NO: 48) | GAAAATTGTATGTGTGTG (SEQ ID NO: 1911) |
| 359 | SEQ ID NO: 9 (SEQ ID NO: 9) | AGTGTTCGTCGTAGTT (SEQ ID NO: 1914) |
| 360 | SEQ ID NO: 9 (SEQ ID NO: 9) | TGAGTGTTTGTTGTAGT (SEQ ID NO: 1915) |
| 361 | SEQ ID NO: 4 (SEQ ID NO: 4) | TTTTGTTCGCGTTGAA (SEQ ID NO: 1916) |
| 362 | SEQ ID NO: 4 (SEQ ID NO: 4) | TTGTTTGTGTTGAAGTA (SEQ ID NO: 1917) |
| 363 | SEQ ID NO: 4 (SEQ ID NO: 4) | GGGTCGCGAGGTAGTT (SEQ ID NO: 1918) |
| 364 | SEQ ID NO: 4 (SEQ ID NO: 4) | TGGGTTGTGAGGTAGT (SEQ ID NO: 1919) |
| 365 | SEQ ID NO: 4 (SEQ ID NO: 4) | TTTGTGCGACGTTATT (SEQ ID NO: 1920) |
| 366 | SEQ ID NO: 4 (SEQ ID NO: 4) | GGTTTGTGTGATGTTAT (SEQ ID NO: 1921) |
| 367 | SEQ ID NO: 4 (SEQ ID NO: 4) | ATGGCGGTTTCGATTT (SEQ ID NO: 1922) |
| 368 | SEQ ID NO: 4 (SEQ ID NO: 4) | GATGGTGGTTTTGATTT (SEQ ID NO: 1923) |
| 369 | SEQ ID NO: 7 (SEQ ID NO: 7) | TAGTCGTCGTGTAGGA (SEQ ID NO: 1932) |
| 370 | SEQ ID NO: 7 (SEQ ID NO: 7) | TAGGTAGTTGTTGTGTA (SEQ ID NO: 1933) |
| 371 | SEQ ID NO: 7 (SEQ ID NO: 7) | TATAGGTACGCGATGA (SEQ ID NO: 1934) |
| 372 | SEQ ID NO: 7 (SEQ ID NO: 7) | AGGTATGTGATGAGGA (SEQ ID NO: 1935) |
| 373 | SEQ ID NO: 7 (SEQ ID NO: 7) | ATGATTTGCGTTACGT (SEQ ID NO: 1938) |
| 374 | SEQ ID NO: 7 (SEQ ID NO: 7) | ATGATTTGTGTTATGTTT (SEQ ID NO: 1939) |
| 375 | SEQ ID NO: 7 (SEQ ID NO: 7) | TAACGTTGTGGTTCGAA (SEQ ID NO: 1940) |
| 376 | SEQ ID NO: 7 (SEQ ID NO: 7) | TAATGTTGTGGTTTGAA (SEQ ID NO: 1941) |
| 377 | SEQ ID NO: 7 (SEQ ID NO: 7) | TAACGTTGTGGTTCGAA (SEQ ID NO: 1940) |
| 378 | SEQ ID NO: 7 (SEQ ID NO: 7) | TAATGTTGTGGTTTGAA (SEQ ID NO: 1941) |
| 379 | PROSTAGLANDIN E2 RECEPTOR, EP4 | AGGTAATCGAGGCGGT (SEQ ID NO: 1952) |
| | SUBTYPE (PROSTANOID EP4 RECEPTOR) | |
| | (PGE RECEPTOR, EP4 SUBTYPE) (SEQ | |
| | ID NO: 10) | |
| 380 | PROSTAGLANDIN E2 RECEPTOR, EP4 | AGGTAATTGAGGTGGT (SEQ ID NO: 1953) |
| | SUBTYPE (PROSTANOID EP4 RECEPTOR) | |
| | (PGE RECEPTOR, EP4 SUBTYPE) (SEQ | |
| | ID NO: 10) | |
| 381 | PROSTAGLANDIN E2 RECEPTOR, EP4 | AGGTAATCGAGGCGGT (SEQ ID NO: 1952) |
| | SUBTYPE (PROSTANOID EP4 RECEPTOR) | |
| | (PGE RECEPTOR, EP4 SUBTYPE) (SEQ | |
| | ID NO: 10) | |
| 382 | PROSTAGLANDIN E2 RECEPTOR, EP4 | AGGTAATTGAGGTGGT (SEQ ID NO: 1953) |
| | SUBTYPE (PROSTANOID EP4 RECEPTOR) | |
| | (PGE RECEPTOR, EP4 SUBTYPE) (SEQ | |
| | ID NO: 10) | |
| 383 | ORPHAN NUCLEAR RECEPTOR NR5A2 | TTACGGAGGCGTTTTA (SEQ ID NO: 1958) |
| | (ALPHA-1-FETOPROTEIN | |
| | TRANSCRIPTION FACTOR) | |
| | (HEPATOCYTIC TRANSCRIPTION | |
| | FACTOR) (B1-BINDING FACTOR) | |
| | (HB1F) (CYP7A PROMOTER BINDING | |
| | FACTOR) (SEQ ID NO: 11) | |
| 384 | ORPHAN NUCLEAR RECEPTOR NR5A2 | TTTTATGGAGGTGTTTT (SEQ ID NO: 1959) |
| | (ALPHA-1-FETOPROTEIN | |
| | TRANSCRIPTION FACTOR) | |
| | (HEPATOCYTIC TRANSCRIPTION | |
| | FACTOR) (B1-BINDING FACTOR) | |
| | (HB1F) (CYP7A PROMOTER BINDING | |
| | FACTOR) (SEQ ID NO: 11) | |
| 385 | ORPHAN NUCLEAR RECEPTOR NR5A2 | AGGCGAATTTATCGGG (SEQ ID NO: 1960) |
| | (ALPHA-1-FETOPROTEIN | |
| | TRANSCRIPTION FACTOR) | |
| | (HEPATOCYTIC TRANSCRIPTION | |
| | FACTOR) (B1-BINDING FACTOR) | |
| | (HB1F) (CYP7A PROMOTER BINDING | |
| | FACTOR) (SEQ ID NO: 11) | |
| 386 | ORPHAN NUCLEAR RECEPTOR NR5A2 | GGTGAATTTATTGGGG (SEQ ID NO: 1961) |
| | (ALPHA-1-FETOPROTEIN | |
| | TRANSCRIPTION FACTOR) | |
| | (HEPATOCYTIC TRANSCRIPTION | |
| | FACTOR) (B1-BINDING FACTOR) | |
| | (HB1F) (CYP7A PROMOTER BINDING | |
| | FACTOR) (SEQ ID NO: 11) | |
| 387 | ORPHAN NUCLEAR RECEPTOR NR5A2 | TAGTCGAAGTAGGCGT (SEQ ID NO: 1962) |
| | (ALPHA-1-FETOPROTEIN | |
| | TRANSCRIPTION FACTOR) | |
| | (HEPATOCYTIC TRANSCRIPTION | |
| | FACTOR) (B1-BINDING FACTOR) | |
| | (HB1F) (CYP7A PROMOTER BINDING | |
| | FACTOR) (SEQ ID NO: 11) | |
| 388 | ORPHAN NUCLEAR RECEPTOR NR5A2 | TAGTTGAAGTAGGTGTT (SEQ ID NO: 1963) |
| | (ALPHA-1-FETOPROTEIN | |
| | TRANSCRIPTION FACTOR) | |
| | (HEPATOCYTIC TRANSCRIPTION | |
| | FACTOR) (B1-BINDING FACTOR) | |
| | (HB1F) (CYP7A PROMOTER BINDING | |
| | FACTOR) (SEQ ID NO: 11) | |
| 389 | LIM DOMAIN KINASE 1 (EC | TGTAGTCGGGAGGTTA (SEQ ID NO: 1966) |
| | 2.7.1.37) (LIMK-1) (SEQ ID NO: | |
| | 12) | |
| 390 | LIM DOMAIN KINASE 1 (EC | TGTAGTTGGGAGGTTA (SEQ ID NO: 1967) |
| | 2.7.1.37) (LIMK-1) (SEQ ID NO: | |
| | 12) | |
| 391 | LIM DOMAIN KINASE 1 (EC | TGTAGTCGGGAGGTTA (SEQ ID NO: 1966) |
| | 2.7.1.37) (LIMK-1) (SEQ ID NO: | |
| | 12) | |
| 392 | LIM DOMAIN KINASE 1 (EC | TGTAGTTGGGAGGTTA (SEQ ID NO: 1967) |
| | 2.7.1.37) (LIMK-1) (SEQ ID NO: | |
| | 12) | |
| 393 | LIM DOMAIN KINASE 1 (EC | GGATTATCGCGGGGGT (SEQ ID NO: 1968) |
| | 2.7.1.37) (LIMK-1) (SEQ ID NO: | |
| | 12) | |
| 394 | LIM DOMAIN KINASE 1 (EC | GGATTATTGTGGGGGT (SEQ ID NO: 1969) |
| | 2.7.1.37) (LIMK-1) (SEQ ID NO: | |
| | 12) | |
| 395 | LIM DOMAIN KINASE 1 (EC | GGATTATCGCGGGGGT (SEQ ID NO: 1968) |
| | 2.7.1.37) (LIMK-1) (SEQ ID NO: | |
| | 12) | |
| 396 | LIM DOMAIN KINASE 1 (EC | GGATTATTGTGGGGGT (SEQ ID NO: 1969) |
| | 2.7.1.37) (LIMK-1) (SEQ ID NO: | |
| | 12) | |
| 397 | LIM DOMAIN KINASE 1 (EC | GTCGGTAGTTTATCGGAT (SEQ ID NO: 1970) |
| | 2.7.1.37) (LIMK-1) (SEQ ID NO: | |
| | 12) | |
| 398 | LIM DOMAIN KINASE 1 (EC | GTTGGTAGTTTATTGGAT (SEQ ID NO: 1971) |
| | 2.7.1.37) (LIMK-1) (SEQ ID NO: | |
| | 12) | |
| 399 | LIM DOMAIN KINASE 1 (EC | GTCGGTAGTTTATCGGAT (SEQ ID NO: 1970) |
| | 2.7.1.37) (LIMK-1) (SEQ ID NO: | |
| | 12) | |
| 400 | LIM DOMAIN KINASE 1 (EC | GTTGGTAGTTTATTGGAT (SEQ ID NO: 1971) |
| | 2.7.1.37) (LIMK-1) (SEQ ID NO: | |
| | 12) | |
| 401 | BCL11B (SEQ ID NO: 50) | TAGGTTTCGATTCGTT (SEQ ID NO: 1974) |
| 402 | BCL11B (SEQ ID NO: 50) | TTAGGTTTTGATTTGTTT (SEQ ID NO: 1975) |
| 403 | BCL11B (SEQ ID NO: 50) | AAGTCGTCGGAGTTAG (SEQ ID NO: 1976) |
| 404 | BCL11B (SEQ ID NO: 50) | GTGAAGTTGTTGGAGT (SEQ ID NO: 1977) |
| 405 | MSF (SEQ ID NO: 13) | GTTTCGAAATTGGCGT (SEQ ID NO: 1980) |
| 406 | MSF (SEQ ID NO: 13) | TTTGAAATTGGTGTGG (SEQ ID NO: 1981) |
| 407 | MSF (SEQ ID NO: 13) | TTCGGTTTACGGGTTGTA (SEQ ID NO: 1982) |
| 408 | MSF (SEQ ID NO: 13) | TTTGGTTTATGGGTTGTA (SEQ ID NO: 1983) |
| 409 | MSF (SEQ ID NO: 13) | TTCGGTTTACGGGTTGTA (SEQ ID NO: 1982) |
| 410 | MSF (SEQ ID NO: 13) | TTTGGTTTATGGGTTGTA (SEQ ID NO: 1983) |
| 411 | MSF (SEQ ID NO: 13) | TTACGGTTCGATTTTG (SEQ ID NO: 1984) |
| 412 | MSF (SEQ ID NO: 13) | TATGGTTTGATTTTGGG (SEQ ID NO: 1985) |
| 413 | SEQ ID NO: 14 (SEQ ID NO: 14) | TAAGGCGTTTTCGATA (SEQ ID NO: 1986) |
| 414 | SEQ ID NO: 14 (SEQ ID NO: 14) | GTAAGGTGTTTTTGATAT (SEQ ID NO: 1987) |
| 415 | SEQ ID NO: 16 (SEQ ID NO: 16) | AGGAGTTTTCGTGTCGT (SEQ ID NO: 1992) |
| 416 | SEQ ID NO: 16 (SEQ ID NO: 16) | AGGAGTTTTTGTGTTGT (SEQ ID NO: 1993) |
| 417 | SEQ ID NO: 16 (SEQ ID NO: 16) | AGGAGTTTTCGTGTCGT (SEQ ID NO: 1992) |
| 418 | SEQ ID NO: 16 (SEQ ID NO: 16) | AGGAGTTTTTGTGTTGT (SEQ ID NO: 1993) |
| 419 | SEQ ID NO: 16 (SEQ ID NO: 16) | AGGCGTTGTCGGTGAT (SEQ ID NO: 1996) |
| 420 | SEQ ID NO: 16 (SEQ ID NO: 16) | AGGTGTTGTTGGTGATA (SEQ ID NO: 1997) |
| 421 | SEQ ID NO: 17 (SEQ ID NO: 17) | TACGTTTCGGGTTTGTTA (SEQ ID NO: 1998) |
| 422 | SEQ ID NO: 17 (SEQ ID NO: 17) | TATGTTTTGGGTTTGTTA (SEQ ID NO: 1999) |
| 423 | SEQ ID NO: 17 (SEQ ID NO: 17) | TACGTTTCGGGTTTGTTA (SEQ ID NO: 1998) |
| 424 | SEQ ID NO: 17 (SEQ ID NO: 17) | TATGTTTTGGGTTTGTTA (SEQ ID NO: 1999) |
| 425 | SEQ ID NO: 17 (SEQ ID NO: 17) | ATTTAGTCGTGCGTTT (SEQ ID NO: 2000) |
| 426 | SEQ ID NO: 17 (SEQ ID NO: 17) | TGATTTAGTTGTGTGTT (SEQ ID NO: 2001) |
| 427 | SEQ ID NO: 18 (SEQ ID NO: 18) | TTTACGCGGGGTTTTA (SEQ ID NO: 2002) |
| 428 | SEQ ID NO: 18 (SEQ ID NO: 18) | TTTATGTGGGGTTTTAG (SEQ ID NO: 2003) |
| 429 | SEQ ID NO: 18 (SEQ ID NO: 18) | TTACGTCGTTATTAGGT (SEQ ID NO: 2004) |
| 430 | SEQ ID NO: 18 (SEQ ID NO: 18) | TTTTATGTTGTTATTAGGT (SEQ ID NO: 2005) |
| 431 | SEQ ID NO: 18 (SEQ ID NO: 18) | AAAGCGGAGTCGTTAG (SEQ ID NO: 2010) |
| 432 | SEQ ID NO: 18 (SEQ ID NO: 18) | AGTGGAGTTGTTAGGT (SEQ ID NO: 2011) |
| 433 | SEQ ID NO: 19 (SEQ ID NO: 19) | AGGTTTTCGTTGTAGTA (SEQ ID NO: 2012) |
| 434 | SEQ ID NO: 19 (SEQ ID NO: 19) | TAGGTTTTTGTTGTAGTA (SEQ ID NO: 2013) |
| 435 | NR2E1 (SEQ ID NO: 22) | AATGTAGCGGCGTTAT (SEQ ID NO: 2028) |
| 436 | NR2E1 (SEQ ID NO: 22) | TAAATGTAGTGGTGTTAT (SEQ ID NO: 2029) |
| 437 | NR2E1 (SEQ ID NO: 22) | GTCGTTATCGGTTTGGA (SEQ ID NO: 2030) |
| 438 | NR2E1 (SEQ ID NO: 22) | GTTGTTATTGGTTTGGA (SEQ ID NO: 2031) |
| 439 | NR2E1 (SEQ ID NO: 22) | GTCGTTATCGGTTTGGA (SEQ ID NO: 2030) |
| 440 | NR2E1 (SEQ ID NO: 22) | GTTGTTATTGGTTTGGA (SEQ ID NO: 2031) |
| 441 | NR2E1 (SEQ ID NO: 22) | GACGTAAGTTTCGGGT (SEQ ID NO: 2032) |
| 442 | NR2E1 (SEQ ID NO: 22) | GGATGTAAGTTTTGGG (SEQ ID NO: 2033) |
| 443 | NR2E1 (SEQ ID NO: 22) | TTTTTAGTCGCGAGAA (SEQ ID NO: 2034) |
| 444 | NR2E1 (SEQ ID NO: 22) | TTTTTAGTTGTGAGAAGT (SEQ ID NO: 2035) |
| 445 | NR2E1 (SEQ ID NO: 22) | TTCGGGTGATATCGTTT (SEQ ID NO: 2036) |
| 446 | NR2E1 (SEQ ID NO: 22) | TTTGGGTGATATTGTTT (SEQ ID NO: 2037) |
| 447 | NR2E1 (SEQ ID NO: 22) | TTCGGGTGATATCGTTT (SEQ ID NO: 2036) |
| 448 | NR2E1 (SEQ ID NO: 22) | TTTGGGTGATATTGTTT (SEQ ID NO: 2037) |
| 449 | NR2E1 (SEQ ID NO: 22) | AGGCGAGTCGGAGTTT (SEQ ID NO: 2038) |
| 450 | NR2E1 (SEQ ID NO: 22) | AGGTGAGTTGGAGTTTT (SEQ ID NO: 2039) |
| 451 | NR2E1 (SEQ ID NO: 22) | AGGGACGCGAAAATTT (SEQ ID NO: 2042) |
| 452 | NR2E1 (SEQ ID NO: 22) | GGAGGGATGTGAAAAT (SEQ ID NO: 2043) |
| 453 | PCDH7 (SEQ ID NO: 23) | ATCGTAGTCGGTTTTA (SEQ ID NO: 2044) |
| 454 | PCDH7 (SEQ ID NO: 23) | GATTATTGTAGTTGGTTT (SEQ ID NO: 2045) |
| 455 | RTTN (SEQ ID NO: 25) | TAGATTGACGGGACGA (SEQ ID NO: 2221) |
| 456 | RTTN (SEQ ID NO: 25) | TAGATTGATGGGATGAG (SEQ ID NO: 2222) |
| 457 | RTTN (SEQ ID NO: 25) | TAGTGGCGCGGTAGTT (SEQ ID NO: 2046) |
| 458 | RTTN (SEQ ID NO: 25) | TAGTGGTGTGGTAGTTT (SEQ ID NO: 2047) |
| 459 | RTTN (SEQ ID NO: 25) | TAGGACGTGTTTTCGG (SEQ ID NO: 2048) |
| 460 | RTTN (SEQ ID NO: 25) | AGGATGTGTTTTTGGG (SEQ ID NO: 2049) |
| 461 | SNAP25 (SEQ ID NO: 33) | TATTTCGAGTTAGAGTTACGA (SEQ ID NO: |
| | | 2050) |
| 462 | SNAP25 (SEQ ID NO: 33) | TATTTTGAGTTAGAGTTATGA (SEQ ID NO: |
| | | 2051) |
| 463 | SNAP25 (SEQ ID NO: 33) | TATTTCGAGTTAGAGTTACGA (SEQ ID NO: |
| | | 2050) |
| 464 | SNAP25 (SEQ ID NO: 33) | TATTTTGAGTTAGAGTTATGA (SEQ ID NO: |
| | | 2051) |
| 465 | GIRK2 (SEQ ID NO: 27) | AGTTGTTCGTAGGCGA (SEQ ID NO: 2060) |
| 466 | GIRK2 (SEQ ID NO: 27) | AGTTGTTTGTAGGTGA (SEQ ID NO: 2061) |
| 467 | GIRK2 (SEQ ID NO: 27) | AGTTGTTCGTAGGCGA (SEQ ID NO: 2060) |
| 468 | GIRK2 (SEQ ID NO: 27) | AGTTGTTTGTAGGTGA (SEQ ID NO: 2061) |
| 469 | GIRK2 (SEQ ID NO: 27) | TTATTTCGTTCGTAGTT (SEQ ID NO: 2062) |
| 470 | GIRK2 (SEQ ID NO: 27) | TTTGTTTGTAGTTAGGTA (SEQ ID NO: 2063) |
| 471 | GIRK2 (SEQ ID NO: 27) | TTAGTCGAAAGGCGAG (SEQ ID NO: 2064) |
| 472 | GIRK2 (SEQ ID NO: 27) | TAGTTGAAAGGTGAGG (SEQ ID NO: 2065) |
| 473 | SEQ ID NO: 28 (SEQ ID NO: 28) | ATTAGGCGAGTTTCGT (SEQ ID NO: 2066) |
| 474 | SEQ ID NO: 28 (SEQ ID NO: 28) | TTAGGTGAGTTTTGTTT (SEQ ID NO: 2067) |
| 475 | SEQ ID NO: 31 (SEQ ID NO: 31) | TTTACGTAGGGCGATT (SEQ ID NO: 2068) |
| 476 | SEQ ID NO: 31 (SEQ ID NO: 31) | ATTTTTATGTAGGGTGAT (SEQ ID NO: 2069) |
| 477 | SEQ ID NO: 31 (SEQ ID NO: 31) | GATACGGTTAGGCGGG (SEQ ID NO: 2070) |
| 478 | SEQ ID NO: 31 (SEQ ID NO: 31) | GATATGGTTAGGTGGG (SEQ ID NO: 2071) |
| 479 | SEQ ID NO: 31 (SEQ ID NO: 31) | GATACGGTTAGGCGGG (SEQ ID NO: 2070) |
| 480 | SEQ ID NO: 31 (SEQ ID NO: 31) | GATATGGTTAGGTGGG (SEQ ID NO: 2071) |
| 481 | SEQ ID NO: 31 (SEQ ID NO: 31) | TTCGGGCGTTTTATAT (SEQ ID NO: 2072) |
| 482 | SEQ ID NO: 31 (SEQ ID NO: 31) | GGTTTGGGTGTTTTATA (SEQ ID NO: 2073) |
| 483 | HOXB13 (SEQ ID NO: 34) | GTCGTTATTATTTCGAGG (SEQ ID NO: 2074) |
| 484 | HOXB13 (SEQ ID NO: 34) | GTTGTTATTATTTTGAGGA (SEQ ID NO: 2075) |
| 485 | HOXB13 (SEQ ID NO: 34) | AAGTTAGCGGGTTCGT (SEQ ID NO: 2076) |
| 486 | HOXB13 (SEQ ID NO: 34) | AAGTTAGTGGGTTTGT (SEQ ID NO: 2077) |
| 487 | HOXB13 (SEQ ID NO: 34) | AAGTTAGCGGGTTCGT (SEQ ID NO: 2076) |
| 488 | HOXB13 (SEQ ID NO: 34) | AAGTTAGTGGGTTTGT (SEQ ID NO: 2077) |
| 489 | LMX1A (SEQ ID NO: 38) | GTCGGGTTTTTCGGAA (SEQ ID NO: 2092) |
| 490 | LMX1A (SEQ ID NO: 38) | GTTGGGTTTTTTGGAAG (SEQ ID NO: 2093) |
| 491 | TITF1 (SEQ ID NO: 41) | GTCGTGGGGATCGTAT (SEQ ID NO: 2104) |
| 492 | TITF1 (SEQ ID NO: 41) | GTTGTGGGGATTGTAT (SEQ ID NO: 2105) |
| 493 | TITF1 (SEQ ID NO: 41) | GTCGTGGGGATCGTAT (SEQ ID NO: 2104) |
| 494 | TITF1 (SEQ ID NO: 41) | GTTGTGGGGATTGTAT (SEQ ID NO: 2105) |
| 495 | TITF1 (SEQ ID NO: 41) | GGTTCGTTTAAGTTCGG (SEQ ID NO: 2106) |
| 496 | TITF1 (SEQ ID NO: 41) | GGTTTGTTTAAGTTTGG (SEQ ID NO: 2107) |
| 497 | TITF1 (SEQ ID NO: 41) | GGTTCGTTTAAGTTCGG (SEQ ID NO: 2106) |
| 498 | TITF1 (SEQ ID NO: 41) | GGTTTGTTTAAGTTTGG (SEQ ID NO: 2107) |
| 499 | TITF1 (SEQ ID NO: 41) | TATTTCGTTTTCGTAATT (SEQ ID NO: 2110) |
| 500 | TITF1 (SEQ ID NO: 41) | TTTGTTTTTGTAATTAGATT (SEQ ID NO: |
| | | 2111) |
| 501 | DDX51 (SEQ ID NO: 43) | AACGTGCGGGGTTTTT (SEQ ID NO: 2116) |
| 502 | DDX51 (SEQ ID NO: 43) | TGAATGTGTGGGGTTT (SEQ ID NO: 2117) |
| 503 | SEQ ID NO: 46 (SEQ ID NO: 46) | GAGTCGGGTTATCGTT (SEQ ID NO: 2120) |
| 504 | SEQ ID NO: 46 (SEQ ID NO: 46) | GGAGTTGGGTTATTGT (SEQ ID NO: 2121) |
| 505 | SEQ ID NO: 46 (SEQ ID NO: 46) | TTACGGATGTTTCGGT (SEQ ID NO: 2122) |
| 506 | SEQ ID NO: 46 (SEQ ID NO: 46) | TTTATGGATGTTTTGGT (SEQ ID NO: 2123) |
| 507 | SEQ ID NO: 46 (SEQ ID NO: 46) | TGACGTATTTTCGGTT (SEQ ID NO: 2124) |
| 508 | SEQ ID NO: 46 (SEQ ID NO: 46) | GGTGATGTATTTTTGGT (SEQ ID NO: 2125) |
| 509 | SEQ ID NO: 46 (SEQ ID NO: 46) | ATAGTCGGAATCGTTG (SEQ ID NO: 2126) |
| 510 | SEQ ID NO: 46 (SEQ ID NO: 46) | TAGTTGGAATTGTTGTT (SEQ ID NO: 2127) |
| 511 | SEQ ID NO: 2 (SEQ ID NO: 2) | TAGTAGTCGGCGGGAG (SEQ ID NO: 2130) |
| 512 | SEQ ID NO: 2 (SEQ ID NO: 2) | TAGTAGTTGGTGGGAG (SEQ ID NO: 2131) |
| 513 | SEQ ID NO: 2 (SEQ ID NO: 2) | TAGTAGTCGGCGGGAG (SEQ ID NO: 2130) |
| 514 | SEQ ID NO: 2 (SEQ ID NO: 2) | TAGTAGTTGGTGGGAG (SEQ ID NO: 2131) |
| 515 | SEQ ID NO: 3 (SEQ ID NO: 3) | TTGCGTTAATTCGGTA (SEQ ID NO: 2132) |
| 516 | SEQ ID NO: 3 (SEQ ID NO: 3) | AATTTGTGTTAATTTGGT (SEQ ID NO: 2133) |
| 517 | SEQ ID NO: 3 (SEQ ID NO: 3) | AGTCGGGAGAGCGAAA (SEQ ID NO: 2134) |
| 518 | SEQ ID NO: 3 (SEQ ID NO: 3) | AGTTGGGAGAGTGAAA (SEQ ID NO: 2135) |
| 519 | SEQ ID NO: 3 (SEQ ID NO: 3) | AGTCGGGAGAGCGAAA (SEQ ID NO: 2134) |
| 520 | SEQ ID NO: 3 (SEQ ID NO: 3) | AGTTGGGAGAGTGAAA (SEQ ID NO: 2135) |
| 521 | SEQ ID NO: 3 (SEQ ID NO: 3) | GGTCGAAGAGTCGGGA (SEQ ID NO: 2136) |
| 522 | SEQ ID NO: 3 (SEQ ID NO: 3) | GGTTGAAGAGTTGGGA (SEQ ID NO: 2137) |
| 523 | SEQ ID NO: 3 (SEQ ID NO: 3) | GGTCGAAGAGTCGGGA (SEQ ID NO: 2136) |
| 524 | SEQ ID NO: 3 (SEQ ID NO: 3) | GGTTGAAGAGTTGGGA (SEQ ID NO: 2137) |
| 525 | SEQ ID NO: 3 (SEQ ID NO: 3) | ATGTTAGCGGGTCGAA (SEQ ID NO: 2138) |
| 526 | SEQ ID NO: 3 (SEQ ID NO: 3) | ATGTTAGTGGGTTGAA (SEQ ID NO: 2139) |
| 527 | SEQ ID NO: 3 (SEQ ID NO: 3) | ATGTTAGCGGGTCGAA (SEQ ID NO: 2138) |
| 528 | SEQ ID NO: 3 (SEQ ID NO: 3) | ATGTTAGTGGGTTGAA (SEQ ID NO: 2139) |

TABLE 20
Breast cancer vs. benign breast conditions

| | | |
|---|---|---|
| No: | Gene | Oligo: |

| | | |
|---|---|---|
| 1 | SCGB3A1 (SEQ ID NO: 115) | GGCGTAGAAGGCGTTT (SEQ ID NO: 2140) |
| 2 | SCGB3A1 (SEQ ID NO: 115) | GGTGTAGAAGGTGTTT (SEQ ID NO: 2141) |
| 3 | SCGB3A1 (SEQ ID NO: 115) | GGCGTAGAAGGCGTTT (SEQ ID NO: 2140) |
| 4 | SCGB3A1 (SEQ ID NO: 115) | GGTGTAGAAGGTGTTT (SEQ ID NO: 2141) |
| 5 | SCGB3A1 (SEQ ID NO: 115) | TAGTGTTCGACGTTGT (SEQ ID NO: 1475) |
| 6 | SCGB3A1 (SEQ ID NO: 115) | TAGTGTTTGATGTTGTT (SEQ ID NO: 1476) |
| 7 | ARH1/NOEY2 (SEQ ID NO: 97) | TAAAACGTTCGGTAGG (SEQ ID NO: 1485) |
| 8 | ARH1/NOEY2 (SEQ ID NO: 97) | TTTAAAATGTTTGGTAGG (SEQ ID NO: 1486) |
| 9 | ARH1/NOEY2 (SEQ ID NO: 97) | TGTATTCGTCGTTAGG (SEQ ID NO: 1487) |
| 10 | ARH1/NOEY2 (SEQ ID NO: 97) | AATGTATTTGTTGTTAGG (SEQ ID NO: 1488) |
| 11 | ARH1/NOEY2 (SEQ ID NO: 97) | TTAGACGGAGTTCGGA (SEQ ID NO: 1489) |
| 12 | ARH1/NOEY2 (SEQ ID NO: 97) | TAGATGGAGTTTGGAGA (SEQ ID NO: 1490) |
| 13 | ARH1/NOEY2 (SEQ ID NO: 97) | TAGACGTAGGCGTATT (SEQ ID NO: 1491) |
| 14 | ARH1/NOEY2 (SEQ ID NO: 97) | GGGTAGATGTAGGTGT (SEQ ID NO: 1492) |
| 15 | CCND2 (SEQ ID NO: 104) | TTAGGGTCGATCGTGT (SEQ ID NO: 1493) |
| 16 | CCND2 (SEQ ID NO: 104) | TAGGGTTGATTGTGTT (SEQ ID NO: 1494) |
| 17 | CCND2 (SEQ ID NO: 104) | TTATCGTAGTCGGTTT (SEQ ID NO: 1495) |
| 18 | CCND2 (SEQ ID NO: 104) | GATTTTATTGTAGTTGGT (SEQ ID NO: 1496) |
| 19 | CCND2 (SEQ ID NO: 104) | GAGTGAGGCGCGAAAT (SEQ ID NO: 1497) |
| 20 | CCND2 (SEQ ID NO: 104) | GAGTGAGGTGTGAAAT (SEQ ID NO: 1498) |
| 21 | CCND2 (SEQ ID NO: 104) | GAGTGAGGCGCGAAAT (SEQ ID NO: 1497) |
| 22 | CCND2 (SEQ ID NO: 104) | GAGTGAGGTGTGAAAT (SEQ ID NO: 1498) |
| 23 | CCND2 (SEQ ID NO: 104) | AAGGATCGAGCGTGGA (SEQ ID NO: 1499) |
| 24 | CCND2 (SEQ ID NO: 104) | AAGGATTGAGTGTGGA (SEQ ID NO: 1500) |
| 25 | CCND2 (SEQ ID NO: 104) | AAGGATCGAGCGTGGA (SEQ ID NO: 1499) |
| 26 | CCND2 (SEQ ID NO: 104) | AAGGATTGAGTGTGGA (SEQ ID NO: 1500) |
| 27 | CDKN1A (SEQ ID NO: 67) | ATTAGGGTCGCGTTGA (SEQ ID NO: 1501) |
| 28 | CDKN1A (SEQ ID NO: 67) | ATTAGGGTTGTGTTGA (SEQ ID NO: 1502) |
| 29 | CDKN1A (SEQ ID NO: 67) | ATTAGGGTCGCGTTGA (SEQ ID NO: 1501) |
| 30 | CDKN1A (SEQ ID NO: 67) | ATTAGGGTTGTGTTGA (SEQ ID NO: 1502) |
| 31 | CDKN2A (SEQ ID NO: 57) | GGCGTTGTTTAACGTAT (SEQ ID NO: 1503) |
| 32 | CDKN2A (SEQ ID NO: 57) | GGGTGTTGTTTAATGTA (SEQ ID NO: 1504) |
| 33 | DAPK1 (SEQ ID NO: 98) | TTTCGGAGATTCGGTT (SEQ ID NO: 1509) |
| 34 | DAPK1 (SEQ ID NO: 98) | TTTGGAGATTTGGTTTT (SEQ ID NO: 1510) |
| 35 | DAPK1 (SEQ ID NO: 98) | TTTTAGCGTCGGGGAG (SEQ ID NO: 1511) |
| 36 | DAPK1 (SEQ ID NO: 98) | TTTTAGTGTTGGGGAG (SEQ ID NO: 1512) |
| 37 | DAPK1 (SEQ ID NO: 98) | TTTTAGCGTCGGGGAG (SEQ ID NO: 1511) |
| 38 | DAPK1 (SEQ ID NO: 98) | TTTTAGTGTTGGGGAG (SEQ ID NO: 1512) |
| 39 | EYA4 (SEQ ID NO: 58) | GGTATAAAATCGTAAATTTT (SEQ ID NO: |
| | | 1513) |
| 40 | EYA4 (SEQ ID NO: 58) | GGGTATAAAATTGTAAATTT (SEQ ID NO: |
| | | 1514) |
| 41 | EYA4 (SEQ ID NO: 58) | TATGTAGTCGCGTAGT (SEQ ID NO: 1515) |
| 42 | EYA4 (SEQ ID NO: 58) | TTTATGTAGTTGTGTAGT (SEQ ID NO: 1516) |
| 43 | EYA4 (SEQ ID NO: 58) | GTTTAGATACGAAATGTT (SEQ ID NO: 1517) |
| 44 | EYA4 (SEQ ID NO: 58) | GTTTAGATATGAAATGTTAT (SEQ ID NO: |
| | | 1518) |
| 45 | EYA4 (SEQ ID NO: 58) | AGTTTTGACGTCGTTT (SEQ ID NO: 1519) |
| 46 | EYA4 (SEQ ID NO: 58) | TTGATGTTGTTTTGGAA (SEQ ID NO: 1520) |
| 47 | FHIT (SEQ ID NO: 76) | GTTACGTTAGCGGGTT (SEQ ID NO: 1521) |
| 48 | FHIT (SEQ ID NO: 76) | GGTTATGTTAGTGGGT (SEQ ID NO: 1522) |
| 49 | GSTP1 (SEQ ID NO: 59) | GGCGATTTCGGGGATT (SEQ ID NO: 1525) |
| 50 | GSTP1 (SEQ ID NO: 59) | GGTGATTTTGGGGATTT (SEQ ID NO: 1526) |
| 51 | GSTP1 (SEQ ID NO: 59) | GACGTTCGGGGTGTAG (SEQ ID NO: 1527) |
| 52 | GSTP1 (SEQ ID NO: 59) | GATGTTTGGGGTGTAG (SEQ ID NO: 1528) |
| 53 | GSTP1 (SEQ ID NO: 59) | GACGTTCGGGGTGTAG (SEQ ID NO: 1527) |
| 54 | GSTP1 (SEQ ID NO: 59) | GATGTTTGGGGTGTAG (SEQ ID NO: 1528) |
| 55 | GSTP1 (SEQ ID NO: 59) | AGTTCGCGGGATTTTT (SEQ ID NO: 1529) |
| 56 | GSTP1 (SEQ ID NO: 59) | GGAGTTTGTGGGATTT (SEQ ID NO: 1530) |
| 57 | GSTP1 (SEQ ID NO: 59) | AGTTTTCGTTATTAGTGA (SEQ ID NO: 1531) |
| 58 | GSTP1 (SEQ ID NO: 59) | TAGTTTTTGTTATTAGTGA (SEQ ID NO: 1532) |
| 59 | HIC1 (SEQ ID NO: 85) | TATCGAAGTTTTCGGG (SEQ ID NO: 1533) |
| 60 | HIC1 (SEQ ID NO: 85) | TATTGAAGTTTTTGGGT (SEQ ID NO: 1534) |
| 61 | HIC1 (SEQ ID NO: 85) | TAGCGGTTATTTCGGT (SEQ ID NO: 1535) |
| 62 | HIC1 (SEQ ID NO: 85) | TTTAGTGGTTATTTTGGT (SEQ ID NO: 1536) |
| 63 | HIC1 (SEQ ID NO: 85) | TACGTTTTTCGTAGCGT (SEQ ID NO: 1537) |
| 64 | HIC1 (SEQ ID NO: 85) | ATTATGTTTTTTGTAGTGT (SEQ ID NO: 1538) |
| 65 | HIC1 (SEQ ID NO: 85) | TTCGGTTTTGTCGTATA (SEQ ID NO: 1539) |
| 66 | HIC1 (SEQ ID NO: 85) | TTTGGTTTTGTTGTATAG (SEQ ID NO: 1540) |
| 67 | SERPINB5 (SEQ ID NO: 68) | ATTGTCGTACGTATGT (SEQ ID NO: 1551) |
| 68 | SERPINB5 (SEQ ID NO: 68) | AGAGGATTGTTGTATGTA (SEQ ID NO: 1552) |
| 69 | SERPINB5 (SEQ ID NO: 68) | TTTTTTGTTCGAATATGT (SEQ ID NO: 1553) |
| 70 | SERPINB5 (SEQ ID NO: 68) | TTTGTTTGAATATGTTGG (SEQ ID NO: 1554) |
| 71 | TERT (SEQ ID NO: 92) | TATAACGAACGTCGTT (SEQ ID NO: 2142) |
| 72 | TERT (SEQ ID NO: 92) | AGGTATAATGAATGTTGT (SEQ ID NO: 2143) |
| 73 | TGFBR2 (SEQ ID NO: 93) | AAGACGGTTAGGTCGG (SEQ ID NO: 2144) |
| 74 | TGFBR2 (SEQ ID NO: 93) | AAGATGGTTAGGTTGG (SEQ ID NO: 2145) |
| 75 | TGFBR2 (SEQ ID NO: 93) | AAGACGGTTAGGTCGG (SEQ ID NO: 2144) |
| 76 | TGFBR2 (SEQ ID NO: 93) | AAGATGGTTAGGTTGG (SEQ ID NO: 2145) |
| 77 | THRB (SEQ ID NO: 106) | GGGCGGTTAAGTCGAG (SEQ ID NO: 1569) |
| 78 | THRB (SEQ ID NO: 106) | GGGTGGTTAAGTTGAG (SEQ ID NO: 1570) |
| 79 | THRB (SEQ ID NO: 106) | GGGCGGTTAAGTCGAG (SEQ ID NO: 1569) |
| 80 | THRB (SEQ ID NO: 106) | GGGTGGTTAAGTTGAG (SEQ ID NO: 1570) |
| 81 | TIMP3 (SEQ ID NO: 103) | TTATTAACGGAGGAAGG (SEQ ID NO: 1571) |
| 82 | TIMP3 (SEQ ID NO: 103) | TATTAATGGAGGAAGGG (SEQ ID NO: 1572) |
| 83 | TIMP3 (SEQ ID NO: 103) | TTCGTTATGTGTACGGAA (SEQ ID NO: 1573) |
| 84 | TIMP3 (SEQ ID NO: 103) | TTTGTTATGTGTATGGAA (SEQ ID NO: 1574) |
| 85 | TIMP3 (SEQ ID NO: 103) | TTCGTTATGTGTACGGAA (SEQ ID NO: 1573) |
| 86 | TIMP3 (SEQ ID NO: 103) | TTTGTTATGTGTATGGAA (SEQ ID NO: 1574) |
| 87 | TIMP3 (SEQ ID NO: 103) | GAGTATTTCGAGTTTGT (SEQ ID NO: 1575) |
| 88 | TIMP3 (SEQ ID NO: 103) | AGTATTTTGAGTTTGTATT (SEQ ID NO: 1576) |
| 89 | TIMP3 (SEQ ID NO: 103) | TAAGCGTTAATCGAGT (SEQ ID NO: 1577) |
| 90 | TIMP3 (SEQ ID NO: 103) | TAGGTAAGTGTTAATTGA (SEQ ID NO: 1578) |
| 91 | TP73 (SEQ ID NO: 86) | TAGGATTCGCGTTTTT (SEQ ID NO: 1579) |
| 92 | TP73 (SEQ ID NO: 86) | GGTAGGATTTGTGTTTT (SEQ ID NO: 1580) |
| 93 | CDH13 (SEQ ID NO: 70) | TAGTCGCGTGTATGAA (SEQ ID NO: 1585) |
| 94 | CDH13 (SEQ ID NO: 70) | TGTAGTTGTGTGTATGA (SEQ ID NO: 1586) |
| 95 | TMS1/ASC (SEQ ID NO: 84) | TTCGTTTCGGAGTCGA (SEQ ID NO: 1591) |
| 96 | TMS1/ASC (SEQ ID NO: 84) | TTTGTTTTGGAGTTGAT (SEQ ID NO: 1592) |
| 97 | APAF1 (SEQ ID NO: 82) | GTGTCGTAGCGGTATT (SEQ ID NO: 1593) |
| 98 | APAF1 (SEQ ID NO: 82) | GGTGTTGTAGTGGTAT (SEQ ID NO: 1594) |
| 99 | APAF1 (SEQ ID NO: 82) | AGTAGCGTCGGGTTTT (SEQ ID NO: 1595) |
| 100 | APAF1 (SEQ ID NO: 82) | GAGTAGTGTTGGGTTT (SEQ ID NO: 1596) |
| 101 | SYK (SEQ ID NO: 60) | GAAGTTATCGCGTTGG (SEQ ID NO: 1597) |
| 102 | SYK (SEQ ID NO: 60) | AGAAGTTATTGTGTTGG (SEQ ID NO: 1598) |
| 103 | SYK (SEQ ID NO: 60) | GATCGATGCGGTTTAT (SEQ ID NO: 1599) |
| 104 | SYK (SEQ ID NO: 60) | GGGATTGATGTGGTTT (SEQ ID NO: 1600) |
| 105 | SYK (SEQ ID NO: 60) | TTATTCGGTCGGGATT (SEQ ID NO: 1603) |
| 106 | SYK (SEQ ID NO: 60) | TTTATTTGGTTGGGATT (SEQ ID NO: 1604) |
| 107 | FABP3 (SEQ ID NO: 77) | TAAAGCGGTAGTTCGG (SEQ ID NO: 1609) |
| 108 | FABP3 (SEQ ID NO: 77) | AAGTGGTAGTTTGGGT (SEQ ID NO: 1610) |
| 109 | FABP3 (SEQ ID NO: 77) | TATTGGCGTTGACGTA (SEQ ID NO: 1611) |
| 110 | FABP3 (SEQ ID NO: 77) | TGGTGTTGATGTAGGT (SEQ ID NO: 1612) |
| 111 | RASSF1A (SEQ ID NO: 90) | TACGGGTATTTTCGCGT (SEQ ID NO: 1613) |
| 112 | RASSF1A (SEQ ID NO: 90) | ATATGGGTATTTTTGTGT (SEQ ID NO: 1614) |
| 113 | RASSF1A (SEQ ID NO: 90) | AGAGCGCGTTTAGTTT (SEQ ID NO: 1615) |
| 114 | RASSF1A (SEQ ID NO: 90) | GAGAGTGTGTTTAGTTT (SEQ ID NO: 1616) |
| 115 | RASSF1A (SEQ ID NO: 90) | AGTAAATCGGATTAGGA (SEQ ID NO: 1617) |
| 116 | RASSF1A (SEQ ID NO: 90) | AGTAAATTGGATTAGGAG (SEQ ID NO: 1618) |
| 117 | TWIST (SEQ ID NO: 100) | AGTAAAGGCGTTGCGT (SEQ ID NO: 1619) |
| 118 | TWIST (SEQ ID NO: 100) | AGTAAAGGTGTTGTGT (SEQ ID NO: 1620) |
| 119 | TWIST (SEQ ID NO: 100) | AGTAAAGGCGTTGCGT (SEQ ID NO: 1619) |
| 120 | TWIST (SEQ ID NO: 100) | AGTAAAGGTGTTGTGT (SEQ ID NO: 1620) |
| 121 | TWIST (SEQ ID NO: 100) | TATTTTTCGAGGCGTA (SEQ ID NO: 1621) |
| 122 | TWIST (SEQ ID NO: 100) | TTTTGAGGTGTAGTTTT (SEQ ID NO: 1622) |
| 123 | TWIST (SEQ ID NO: 100) | ATTGGGTCGTTGTAGA (SEQ ID NO: 1623) |
| 124 | TWIST (SEQ ID NO: 100) | ATTGGGTTGTTGTAGA (SEQ ID NO: 1624) |
| 125 | TWIST (SEQ ID NO: 100) | ATTGGGTCGTTGTAGA (SEQ ID NO: 1623) |
| 126 | TWIST (SEQ ID NO: 100) | ATTGGGTTGTTGTAGA (SEQ ID NO: 1624) |
| 127 | TWIST (SEQ ID NO: 100) | TAGGTCGGGACGTAAA (SEQ ID NO: 1625) |
| 128 | TWIST (SEQ ID NO: 100) | AGTAGGTTGGGATGTA (SEQ ID NO: 1626) |
| 129 | ESR2 (SEQ ID NO: 91) | ATAAGCGATTTAACGAT (SEQ ID NO: 1629) |
| 130 | ESR2 (SEQ ID NO: 91) | AAGTGATTTAATGATAAGT (SEQ ID NO: 1630) |
| 131 | PLAU (SEQ ID NO: 62) | TATTTGTCGCGTTGAT (SEQ ID NO: 1633) |
| 132 | PLAU (SEQ ID NO: 62) | ATTTGTTGTGTTGATGA (SEQ ID NO: 1634) |
| 133 | PLAU (SEQ ID NO: 62) | TGTAATTCGGGGATTT (SEQ ID NO: 1635) |
| 134 | PLAU (SEQ ID NO: 62) | TTGTAATTTGGGGATTT (SEQ ID NO: 1636) |
| 135 | PLAU (SEQ ID NO: 62) | TTGGAGATCGCGTTTT (SEQ ID NO: 1637) |
| 136 | PLAU (SEQ ID NO: 62) | TTGGAGATTGTGTTTTT (SEQ ID NO: 1638) |
| 137 | PLAU (SEQ ID NO: 62) | GAGCGTTGCGGAAGTA (SEQ ID NO: 1639) |
| 138 | PLAU (SEQ ID NO: 62) | GAGTGTTGTGGAAGTA (SEQ ID NO: 1640) |
| 139 | PLAU (SEQ ID NO: 62) | GAGCGTTGCGGAAGTA (SEQ ID NO: 1639) |
| 140 | PLAU (SEQ ID NO: 62) | GAGTGTTGTGGAAGTA (SEQ ID NO: 1640) |
| 141 | STAT1 (SEQ ID NO: 109) | GTTATTTTCGAGAGTTG (SEQ ID NO: 1641) |
| 142 | STAT1 (SEQ ID NO: 109) | GTTATTTTTGAGAGTTGT (SEQ ID NO: 1642) |
| 143 | LOT1 (SEQ ID NO: 95) | ATGGGTACGTTTAAGG (SEQ ID NO: 1649) |
| 144 | LOT1 (SEQ ID NO: 95) | TGGGTATGTTTAAGGG (SEQ ID NO: 1650) |
| 145 | GJB2 (SEQ ID NO: 111) | GGATTTCGTCGGTATT (SEQ ID NO: 1667) |
| 146 | GJB2 (SEQ ID NO: 111) | GGGGATTTTGTTGGTA (SEQ ID NO: 1668) |
| 147 | PRDM2 (SEQ ID NO: 114) | TGTAGAGACGACGATT (SEQ ID NO: 1675) |
| 148 | PRDM2 (SEQ ID NO: 114) | ATTGTAGAGATGATGATT (SEQ ID NO: 1676) |
| 149 | PRDM2 (SEQ ID NO: 114) | AGAGCGCGGTAGTAGT (SEQ ID NO: 1677) |
| 150 | PRDM2 (SEQ ID NO: 114) | TGAGAGTGTGGTAGTA (SEQ ID NO: 1678) |
| 151 | PRDM2 (SEQ ID NO: 114) | TGTTCGCGATGTTTTA (SEQ ID NO: 1679) |
| 152 | PRDM2 (SEQ ID NO: 114) | TGTTTGTGATGTTTTAGT (SEQ ID NO: 1680) |
| 153 | ALX4 (SEQ ID NO: 64) | AAGTCGATCGTTTTGT (SEQ ID NO: 1683) |
| 154 | ALX4 (SEQ ID NO: 64) | TGGAAGTTGATTGTTTT (SEQ ID NO: 1684) |
| 155 | ALX4 (SEQ ID NO: 64) | ATATCGTTCGGGGGAA (SEQ ID NO: 2146) |
| 156 | ALX4 (SEQ ID NO: 64) | ATATCGTTCGGGGGAA (SEQ ID NO: 2146) |
| 157 | ALX4 (SEQ ID NO: 64) | TATTGCGAGGATTCGG (SEQ ID NO: 1685) |
| 158 | ALX4 (SEQ ID NO: 64) | ATTGTGAGGATTTGGT (SEQ ID NO: 1686) |
| 159 | ALX4 (SEQ ID NO: 64) | TTCGTAGCGTAGGGTT (SEQ ID NO: 1687) |
| 160 | ALX4 (SEQ ID NO: 64) | TTTGTAGTGTAGGGTTT (SEQ ID NO: 1688) |
| 161 | IGFBP7 (SEQ ID NO: 94) | ATTTTTTCGCGGGTAT (SEQ ID NO: 1710) |
| 162 | IGFBP7 (SEQ ID NO: 94) | TTTTTGTGGGTATTTTAG (SEQ ID NO: 1711) |
| 163 | IGFBP7 (SEQ ID NO: 94) | GGTATATTCGACGGGG (SEQ ID NO: 1712) |
| 164 | IGFBP7 (SEQ ID NO: 94) | GGGTATATTTGATGGGG (SEQ ID NO: 1713) |
| 165 | IGFBP7 (SEQ ID NO: 94) | GGTACGAGCGTTTTTT (SEQ ID NO: 1714) |
| 166 | IGFBP7 (SEQ ID NO: 94) | TGGGTATGAGTGTTTT (SEQ ID NO: 1715) |
| 167 | IGFBP7 (SEQ ID NO: 94) | AAAGCGTATTTAATTCGT (SEQ ID NO: 1716) |
| 168 | IGFBP7 (SEQ ID NO: 94) | AGTGTATTTAATTTGTGTT (SEQ ID NO: 1717) |
| 169 | NME1 (SEQ ID NO: 107) | AGTCGAGATTGCGTTA (SEQ ID NO: 2147) |
| 170 | NME1 (SEQ ID NO: 107) | AGTTGAGATTGTGTTAG (SEQ ID NO: 2148) |
| 171 | NME1 (SEQ ID NO: 107) | ATCGTTTGAATTCGGGA (SEQ ID NO: 2149) |
| 172 | NME1 (SEQ ID NO: 107) | ATTGTTTGAATTTGGGA (SEQ ID NO: 2150) |
| 173 | NME1 (SEQ ID NO: 107) | ATCGTTTGAATTCGGGA (SEQ ID NO: 2149) |
| 174 | NME1 (SEQ ID NO: 107) | ATTGTTTGAATTTGGGA (SEQ ID NO: 2150) |
| 175 | NME1 (SEQ ID NO: 107) | AATTCGAGATTAGTTCGG (SEQ ID NO: 1724) |
| 176 | NME1 (SEQ ID NO: 107) | AATTTGAGATTAGTTTGG (SEQ ID NO: 1725) |
| 177 | NME1 (SEQ ID NO: 107) | AATTCGAGATTAGTTCGG (SEQ ID NO: 1724) |
| 178 | NME1 (SEQ ID NO: 107) | AATTTGAGATTAGTTTGG (SEQ ID NO: 1725) |
| 179 | NME1 (SEQ ID NO: 107) | TTTTAGTACGTTGGAAA (SEQ ID NO: 2151) |
| 180 | NME1 (SEQ ID NO: 107) | TTAGTATGTTGGAAAGTA (SEQ ID NO: 2152) |
| 181 | THBS1 (SEQ ID NO: 81) | TAAAGGGGCGTTCGTA (SEQ ID NO: 1726) |
| 182 | THBS1 (SEQ ID NO: 81) | AAGGGGTGTTTGTATT (SEQ ID NO: 1727) |
| 183 | THBS1 (SEQ ID NO: 81) | GGTTAGTTCGGGCGTA (SEQ ID NO: 1728) |
| 184 | THBS1 (SEQ ID NO: 81) | GGTTAGTTTGGGTGTA (SEQ ID NO: 1729) |
| 185 | THBS1 (SEQ ID NO: 81) | GGTTAGTTCGGGCGTA (SEQ ID NO: 1728) |
| 186 | THBS1 (SEQ ID NO: 81) | GGTTAGTTTGGGTGTA (SEQ ID NO: 1729) |
| 187 | THBS1 (SEQ ID NO: 81) | TTGTGCGTTCGGAGTA (SEQ ID NO: 1730) |
| 188 | THBS1 (SEQ ID NO: 81) | TGTGTTTGGAGTAGAG (SEQ ID NO: 1731) |
| 189 | IL6 (SEQ ID NO: 99) | TTCGGTTATACGTAGG (SEQ ID NO: 1736) |
| 190 | IL6 (SEQ ID NO: 99) | TTTTGGTTATATGTAGGG (SEQ ID NO: 1737) |
| 191 | IL6 (SEQ ID NO: 99) | AGTTTAGTCGGTTTCGT (SEQ ID NO: 1738) |
| 192 | IL6 (SEQ ID NO: 99) | AGTTTAGTTGGTTTTGT (SEQ ID NO: 1739) |
| 193 | IL6 (SEQ ID NO: 99) | AGTTTAGTCGGTTTCGT (SEQ ID NO: 1738) |
| 194 | IL6 (SEQ ID NO: 99) | AGTTTAGTTGGTTTTGT (SEQ ID NO: 1739) |
| 195 | HOXA5 (SEQ ID NO: 78) | TAGTTTTCGGTCGGAA (SEQ ID NO: 1748) |
| 196 | HOXA5 (SEQ ID NO: 78) | TAGTTTTTGGTTGGAAG (SEQ ID NO: 1749) |
| 197 | HOXA5 (SEQ ID NO: 78) | ATCGGTAGTTGACGGTT (SEQ ID NO: 1752) |
| 198 | HOXA5 (SEQ ID NO: 78) | ATTGGTAGTTGATGGTT (SEQ ID NO: 1753) |
| 199 | HOXA5 (SEQ ID NO: 78) | ATCGGTAGTTGACGGTT (SEQ ID NO: 1752) |
| 200 | HOXA5 (SEQ ID NO: 78) | ATTGGTAGTTGATGGTT (SEQ ID NO: 1753) |
| 201 | GPC3 (SEQ ID NO: 118) | AATAGTCGCGTTTAGG (SEQ ID NO: 1760) |
| 202 | GPC3 (SEQ ID NO: 118) | TAGTTGTGTTTAGGGAT (SEQ ID NO: 1761) |
| 203 | CLDN7 (SEQ ID NO: 87) | TTACGTTAAGTCGGGT (SEQ ID NO: 1764) |
| 204 | CLDN7 (SEQ ID NO: 87) | AGTTATGTTAAGTTGGG (SEQ ID NO: 1765) |
| 205 | SLIT2 (SEQ ID NO: 112) | ATTTCGTCGTAGTTTG (SEQ ID NO: 1774) |
| 206 | SLIT2 (SEQ ID NO: 112) | TTTTGTTGTAGTTTGGA (SEQ ID NO: 1775) |
| 207 | SLIT2 (SEQ ID NO: 112) | TAGCGGGTTCGTAGTA (SEQ ID NO: 1776) |
| 208 | SLIT2 (SEQ ID NO: 112) | TTAGTGGGTTTGTAGTA (SEQ ID NO: 1777) |
| 209 | SLIT2 (SEQ ID NO: 112) | AAGGCGCGGAAGTTTA (SEQ ID NO: 1778) |
| 210 | SLIT2 (SEQ ID NO: 112) | AAGGTGTGGAAGTTTA (SEQ ID NO: 1779) |
| 211 | SLIT2 (SEQ ID NO: 112) | AAGGCGCGGAAGTTTA (SEQ ID NO: 1778) |
| 212 | SLIT2 (SEQ ID NO: 112) | AAGGTGTGGAAGTTTA (SEQ ID NO: 1779) |
| 213 | IGSF4 (SEQ ID NO: 74) | AGGTAGATCGAGGAGG (SEQ ID NO: 1780) |
| 214 | IGSF4 (SEQ ID NO: 74) | AGGTAGATTGAGGAGG (SEQ ID NO: 1781) |
| 215 | IGSF4 (SEQ ID NO: 74) | AGGTAGATCGAGGAGG (SEQ ID NO: 1780) |
| 216 | IGSF4 (SEQ ID NO: 74) | AGGTAGATTGAGGAGG (SEQ ID NO: 1781) |
| 217 | IGSF4 (SEQ ID NO: 74) | TAGTCGTAGAGTCGGG (SEQ ID NO: 1782) |
| 218 | IGSF4 (SEQ ID NO: 74) | GTTGTAGAGTTGGGTT (SEQ ID NO: 1783) |
| 219 | MCT1 (SEQ ID NO: 101) | AGTTAGTCGCGTTTTA (SEQ ID NO: 1788) |
| 220 | MCT1 (SEQ ID NO: 101) | AGAGTTAGTTGTGTTTTA (SEQ ID NO: 1789) |
| 221 | SEQ ID NO: 6 (SEQ ID NO: 6) | AAGTTTATCGGCGTTT (SEQ ID NO: 1792) |
| 222 | SEQ ID NO: 6 (SEQ ID NO: 6) | AGAAGTTTATTGGTGTTT (SEQ ID NO: 1793) |
| 223 | SEQ ID NO: 6 (SEQ ID NO: 6) | ATTTCGGAATTTAAGCGT (SEQ ID NO: 1794) |
| 224 | SEQ ID NO: 6 (SEQ ID NO: 6) | TTTTGGAATTTAAGTGTT (SEQ ID NO: 1795) |
| 225 | SEQ ID NO: 6 (SEQ ID NO: 6) | TAATTTCGGACGCGGA (SEQ ID NO: 1796) |
| 226 | SEQ ID NO: 6 (SEQ ID NO: 6) | TTTTGGATGTGGAGGA (SEQ ID NO: 1797) |
| 227 | SEQ ID NO: 6 (SEQ ID NO: 6) | TTACGGTGAAGGCGGA (SEQ ID NO: 1798) |
| 228 | SEQ ID NO: 6 (SEQ ID NO: 6) | TTATGGTGAAGGTGGA (SEQ ID NO: 1799) |
| 229 | SEQ ID NO: 6 (SEQ ID NO: 6) | TTACGGTGAAGGCGGA (SEQ ID NO: 1798) |
| 230 | SEQ ID NO: 6 (SEQ ID NO: 6) | TTATGGTGAAGGTGGA (SEQ ID NO: 1799) |
| 231 | SEQ ID NO: 6 (SEQ ID NO: 6) | TTTCGGTTTTCGTTAAT (SEQ ID NO: 1800) |
| 232 | SEQ ID NO: 6 (SEQ ID NO: 6) | TTTGGTTTTTGTTAATTTAG (SEQ ID NO: |
| | | 1801) |
| 233 | SEQ ID NO: 6 (SEQ ID NO: 6) | TGTGCGAAGTTAACGT (SEQ ID NO: 1802) |
| 234 | SEQ ID NO: 6 (SEQ ID NO: 6) | TTGTGTGAAGTTAATGT (SEQ ID NO: 1803) |
| 235 | SEQ ID NO: 8 (SEQ ID NO: 8) | ATAGGGCGGGATTTTA (SEQ ID NO: 2153) |
| 236 | SEQ ID NO: 8 (SEQ ID NO: 8) | GATAGGGTGGGATTTT (SEQ ID NO: 2154) |
| 237 | SEQ ID NO: 8 (SEQ ID NO: 8) | ATAAAGCGGGGTTTTA (SEQ ID NO: 1804) |
| 238 | SEQ ID NO: 8 (SEQ ID NO: 8) | GGATAAAGTGGGGTTT (SEQ ID NO: 1805) |
| 239 | SEQ ID NO: 8 (SEQ ID NO: 8) | AGGAGGCGAGAAATTT (SEQ ID NO: 1806) |
| 240 | SEQ ID NO: 8 (SEQ ID NO: 8) | GAGGAGGTGAGAAATT (SEQ ID NO: 1807) |
| 241 | SEQ ID NO: 8 (SEQ ID NO: 8) | AGAAATTTCGGGGTAG (SEQ ID NO: 1808) |
| 242 | SEQ ID NO: 8 (SEQ ID NO: 8) | GAAATTTTGGGGTAGTA (SEQ ID NO: 1809) |
| 243 | SEQ ID NO: 8 (SEQ ID NO: 8) | GGTAGTATCGTTTATAGA (SEQ ID NO: 1810) |
| 244 | SEQ ID NO: 8 (SEQ ID NO: 8) | GGGGTAGTATTGTTTATA (SEQ ID NO: 1811) |
| 245 | PROSTAGLANDIN E2 RECEPTOR, EP4 | AGTGTATCGTTTTTCGG (SEQ ID NO: 1812) |
| | SUBTYPE (PROSTANOID EP4 RECEPTOR) | |
| | (PGE RECEPTOR, EP4 SUBTYPE) (SEQ | |
| | ID NO: 10) | |
| 246 | PROSTAGLANDIN E2 RECEPTOR, EP4 | TAGTGTATTGTTTTTTGG (SEQ ID NO: 1813) |
| | SUBTYPE (PROSTANOID EP4 RECEPTOR) | |
| | (PGE RECEPTOR, EP4 SUBTYPE) (SEQ | |
| | ID NO: 10) | |
| 247 | PROSTAGLANDIN E2 RECEPTOR, EP4 | TGCGTATCGTTAGTTA (SEQ ID NO: 1814) |
| | SUBTYPE (PROSTANOID EP4 RECEPTOR) | |
| | (PGE RECEPTOR, EP4 SUBTYPE) (SEQ | |
| | ID NO: 10) | |
| 248 | PROSTAGLANDIN E2 RECEPTOR, EP4 | AGGTTGTGTATTGTTAG (SEQ ID NO: 1815) |
| | SUBTYPE (PROSTANOID EP4 RECEPTOR) | |
| | (PGE RECEPTOR, EP4 SUBTYPE) (SEQ | |
| | ID NO: 10) | |
| 249 | PROSTAGLANDIN E2 RECEPTOR, EP4 | ATTATTTCGGCGGTGA (SEQ ID NO: 1816) |
| | SUBTYPE (PROSTANOID EP4 RECEPTOR) | |
| | (PGE RECEPTOR, EP4 SUBTYPE) (SEQ | |
| | ID NO: 10) | |
| 250 | PROSTAGLANDIN E2 RECEPTOR, EP4 | GATTATTTTGGTGGTGA (SEQ ID NO: 1817) |
| | SUBTYPE (PROSTANOID EP4 RECEPTOR) | |
| | (PGE RECEPTOR, EP4 SUBTYPE) (SEQ | |
| | ID NO: 10) | |
| 251 | PROSTAGLANDIN E2 RECEPTOR, EP4 | TAAGTCGCGTAAGGAG (SEQ ID NO: 1818) |
| | SUBTYPE (PROSTANOID EP4 RECEPTOR) | |
| | (PGE RECEPTOR, EP4 SUBTYPE) (SEQ | |
| | ID NO: 10) | |
| 252 | PROSTAGLANDIN E2 RECEPTOR, EP4 | AAGTTGTGTAAGGAGTA (SEQ ID NO: 1819) |
| | SUBTYPE (PROSTANOID EP4 RECEPTOR) | |
| | (PGE RECEPTOR, EP4 SUBTYPE) (SEQ | |
| | ID NO: 10) | |
| 253 | PROSTAGLANDIN E2 RECEPTOR, EP4 | GTATCGCGAGTTTGGA (SEQ ID NO: 1820) |
| | SUBTYPE (PROSTANOID EP4 RECEPTOR) | |
| | (PGE RECEPTOR, EP4 SUBTYPE) (SEQ | |
| | ID NO: 10) | |
| 254 | PROSTAGLANDIN E2 RECEPTOR, EP4 | GTATTGTGAGTTTGGAG (SEQ ID NO: 1821) |
| | SUBTYPE (PROSTANOID EP4 RECEPTOR) | |
| | (PGE RECEPTOR, EP4 SUBTYPE) (SEQ | |
| | ID NO: 10) | |
| 255 | SEQ ID NO: 51 (SEQ ID NO: 51) | GTCGGGGTCGATTCGA (SEQ ID NO: 1822) |
| 256 | SEQ ID NO: 51 (SEQ ID NO: 51) | GTTGGGGTTGATTTGAT (SEQ ID NO: 1823) |
| 257 | SEQ ID NO: 51 (SEQ ID NO: 51) | AGGATTCGTTTGCGTT (SEQ ID NO: 1824) |
| 258 | SEQ ID NO: 51 (SEQ ID NO: 51) | AAGGATTTGTTTGTGTT (SEQ ID NO: 1825) |
| 259 | MGC34831 (SEQ ID NO: 52) | ATTAGCGTTTGGCGTT (SEQ ID NO: 1826) |
| 260 | MGC34831 (SEQ ID NO: 52) | AATTAGTGTTTGGTGTT (SEQ ID NO: 1827) |
| 261 | MGC34831 (SEQ ID NO: 52) | GTTTAGCGACGGTCGT (SEQ ID NO: 1828) |
| 262 | MGC34831 (SEQ ID NO: 52) | TGTTTAGTGATGGTTGT (SEQ ID NO: 1829) |
| 263 | SEQ ID NO: 54 (SEQ ID NO: 54) | TGTGTAGCGGCGATTA (SEQ ID NO: 1830) |
| 264 | SEQ ID NO: 54 (SEQ ID NO: 54) | GTGTGTAGTGGTGATT (SEQ ID NO: 1831) |
| 265 | SEQ ID NO: 54 (SEQ ID NO: 54) | ATTAGCGTTTGGTCGG (SEQ ID NO: 1832) |
| 266 | SEQ ID NO: 54 (SEQ ID NO: 54) | ATTAGTGTTTGGTTGGG (SEQ ID NO: 1833) |
| 267 | PDLIM1 (SEQ ID NO: 55) | TAGGTCGCGTAGTCGT (SEQ ID NO: 1834) |
| 268 | PDLIM1 (SEQ ID NO: 55) | TTAGGTTGTGTAGTTGT (SEQ ID NO: 1835) |
| 269 | DKK3 (SEQ ID NO: 24) | ATTCGTTTTAGTTCGAG (SEQ ID NO: 1842) |
| 270 | DKK3 (SEQ ID NO: 24) | ATTTGTTTTAGTTTGAGT (SEQ ID NO: 1843) |
| 271 | DKK3 (SEQ ID NO: 24) | TTCGATCGTTTTAGGA (SEQ ID NO: 1844) |
| 272 | DKK3 (SEQ ID NO: 24) | AGTTTTGATTGTTTTAGG (SEQ ID NO: 1845) |
| 273 | DKK3 (SEQ ID NO: 24) | ATTCGTTCGGAGACGG (SEQ ID NO: 1846) |
| 274 | DKK3 (SEQ ID NO: 24) | TTTGTTTGGAGATGGG (SEQ ID NO: 1847) |
| 275 | DKK3 (SEQ ID NO: 24) | GAAAAGACGCGATTTT (SEQ ID NO: 1848) |
| 276 | DKK3 (SEQ ID NO: 24) | GAAAAGATGTGATTTTATT (SEQ ID NO: 1849) |
| 277 | SEQ ID NO: 28 (SEQ ID NO: 28) | TATCGACGTTTTTGGT (SEQ ID NO: 1850) |
| 278 | SEQ ID NO: 28 (SEQ ID NO: 28) | TATTGATGTTTTTGGTTT (SEQ ID NO: 1851) |
| 279 | SEQ ID NO: 29 (SEQ ID NO: 29) | TTGATGCGGAGTTCGA (SEQ ID NO: 1852) |
| 280 | SEQ ID NO: 29 (SEQ ID NO: 29) | TTGATGTGGAGTTTGA (SEQ ID NO: 1853) |
| 281 | SEQ ID NO: 29 (SEQ ID NO: 29) | TTGATGCGGAGTTCGA (SEQ ID NO: 1852) |
| 282 | SEQ ID NO: 29 (SEQ ID NO: 29) | TTGATGTGGAGTTTGA (SEQ ID NO: 1853) |
| 283 | SEQ ID NO: 29 (SEQ ID NO: 29) | TTCGAAGCGTGTATTA (SEQ ID NO: 2155) |
| 284 | SEQ ID NO: 29 (SEQ ID NO: 29) | GGGTTTGAAGTGTGTA (SEQ ID NO: 2156) |
| 285 | SEQ ID NO: 29 (SEQ ID NO: 29) | TTTTCGCGTTTGCGAA (SEQ ID NO: 2157) |
| 286 | SEQ ID NO: 29 (SEQ ID NO: 29) | TTTGTGTTTGTGAAAGG (SEQ ID NO: 2158) |
| 287 | SEQ ID NO: 29 (SEQ ID NO: 29) | TAGGAACGGTAGGCGG (SEQ ID NO: 1854) |
| 288 | SEQ ID NO: 29 (SEQ ID NO: 29) | TAGGAATGGTAGGTGG (SEQ ID NO: 1855) |
| 289 | SEQ ID NO: 29 (SEQ ID NO: 29) | TAGGAACGGTAGGCGG (SEQ ID NO: 1854) |
| 290 | SEQ ID NO: 29 (SEQ ID NO: 29) | TAGGAATGGTAGGTGG (SEQ ID NO: 1855) |
| 291 | SEQ ID NO: 29 (SEQ ID NO: 29) | GTCGGAGGCGTTTGAG (SEQ ID NO: 1856) |
| 292 | SEQ ID NO: 29 (SEQ ID NO: 29) | GTTGGAGGTGTTTGAGA (SEQ ID NO: 1857) |
| 293 | ARL7 (SEQ ID NO: 30) | TAGATTTCGTAGTTTTTTA (SEQ ID NO: 1858) |
| 294 | ARL7 (SEQ ID NO: 30) | TAGATTTTGTAGTTTTTTAA (SEQ ID NO: |
| | | 1859) |
| 295 | ARL7 (SEQ ID NO: 30) | TGGGTACGTTTACGGT (SEQ ID NO: 1860) |
| 296 | ARL7 (SEQ ID NO: 30) | TGGGTATGTTTATGGTT (SEQ ID NO: 1861) |
| 297 | ARL7 (SEQ ID NO: 30) | GAAGAAATCGTTTTTGT (SEQ ID NO: 1862) |
| 298 | ARL7 (SEQ ID NO: 30) | GAAGAAATTGTTTTTGTT (SEQ ID NO: 1863) |
| 299 | ARL7 (SEQ ID NO: 30) | TAGTAGGATCGGTTTTT (SEQ ID NO: 1864) |
| 300 | ARL7 (SEQ ID NO: 30) | ATAGTAGGATTGGTTTTT (SEQ ID NO: 1865) |
| 301 | SEQ ID NO: 31 (SEQ ID NO: 31) | AACGTTGCGTTGGGTA (SEQ ID NO: 1866) |
| 302 | SEQ ID NO: 31 (SEQ ID NO: 31) | AATGTTGTGTTGGGTAA (SEQ ID NO: 1867) |
| 303 | SEQ ID NO: 31 (SEQ ID NO: 31) | TAGCGTTTCGTGGTTA (SEQ ID NO: 1868) |
| 304 | SEQ ID NO: 31 (SEQ ID NO: 31) | GTAGTGTTTTGTGGTTA (SEQ ID NO: 1869) |
| 305 | THH (SEQ ID NO: 32) | TTCGGAAGAAAAGCGAAT (SEQ ID NO: 1870) |
| 306 | THH (SEQ ID NO: 32) | TTTGGAAGAAAAGTGAAT (SEQ ID NO: 1871) |
| 307 | THH (SEQ ID NO: 32) | TTCGGAAGAAAAGCGAAT (SEQ ID NO: 1870) |
| 308 | THH (SEQ ID NO: 32) | TTTGGAAGAAAAGTGAAT (SEQ ID NO: 1871) |
| 309 | THH (SEQ ID NO: 32) | GTTCGTTGGCGTAAAT (SEQ ID NO: 1872) |
| 310 | THH (SEQ ID NO: 32) | GGTTTGTTGGTGTAAAT (SEQ ID NO: 1873) |
| 311 | (SEQ ID NO: 36) | TTCGTTGGAGATCGTAA (SEQ ID NO: 2159) |
| 312 | (SEQ ID NO: 36) | GTTTGTTGGAGATTGTA (SEQ ID NO: 2160) |
| 313 | (SEQ ID NO: 36) | GGACGTTGCGATTGTA (SEQ ID NO: 2161) |
| 314 | (SEQ ID NO: 36) | GATGTTGTGATTGTAGT (SEQ ID NO: 2162) |
| 315 | SENP3 (SEQ ID NO: 39) | TATTCGGATCGGGTTT (SEQ ID NO: 1876) |
| 316 | SENP3 (SEQ ID NO: 39) | TTTATTTGGATTGGGTT (SEQ ID NO: 1877) |
| 317 | SENP3 (SEQ ID NO: 39) | TAGTCGAAAGTAGGACGT (SEQ ID NO: 1878) |
| 318 | SENP3 (SEQ ID NO: 39) | TAGTTGAAAGTAGGATGT (SEQ ID NO: 1879) |
| 319 | SENP3 (SEQ ID NO: 39) | TAGTCGAAAGTAGGACGT (SEQ ID NO: 1878) |
| 320 | SENP3 (SEQ ID NO: 39) | TAGTTGAAAGTAGGATGT (SEQ ID NO: 1879) |
| 321 | SENP3 (SEQ ID NO: 39) | AGGACGTTTTTGATCGG (SEQ ID NO: 1880) |
| 322 | SENP3 (SEQ ID NO: 39) | AGGATGTTTTTGATTGG (SEQ ID NO: 1881) |
| 323 | SENP3 (SEQ ID NO: 39) | AGGACGTTTTTGATCGG (SEQ ID NO: 1880) |
| 324 | SENP3 (SEQ ID NO: 39) | AGGATGTTTTTGATTGG (SEQ ID NO: 1881) |
| 325 | SENP3 (SEQ ID NO: 39) | AGTTATCGTTAGGAGGG (SEQ ID NO: 1882) |
| 326 | SENP3 (SEQ ID NO: 39) | AGTTATTGTTAGGAGGG (SEQ ID NO: 1883) |
| 327 | SENP3 (SEQ ID NO: 39) | AGTTATCGTTAGGAGGG (SEQ ID NO: 1882) |
| 328 | SENP3 (SEQ ID NO: 39) | AGTTATTGTTAGGAGGG (SEQ ID NO: 1883) |
| 329 | SEQ ID NO: 42 (SEQ ID NO: 42) | GAGTCGGGTTGCGATG (SEQ ID NO: 1884) |
| 330 | SEQ ID NO: 42 (SEQ ID NO: 42) | GGAGTTGGGTTGTGAT (SEQ ID NO: 1885) |
| 331 | SEQ ID NO: 42 (SEQ ID NO: 42) | ATGGGTTGCGATTTTTA (SEQ ID NO: 1886) |
| 332 | SEQ ID NO: 42 (SEQ ID NO: 42) | ATGGGTTGTGATTTTTA (SEQ ID NO: 1887) |
| 333 | SEQ ID NO: 42 (SEQ ID NO: 42) | ATGGGTTGCGATTTTTA (SEQ ID NO: 1886) |
| 334 | SEQ ID NO: 42 (SEQ ID NO: 42) | ATGGGTTGTGATTTTTA (SEQ ID NO: 1887) |
| 335 | (SEQ ID NO: 117) | TAGCGGTTTTTTAGCGTA (SEQ ID NO: 1888) |
| 336 | (SEQ ID NO: 117) | AGTGGTTTTTTAGTGTAT (SEQ ID NO: 1889) |
| 337 | (SEQ ID NO: 117) | AGATGCGCGGGTAGAT (SEQ ID NO: 1890) |
| 338 | (SEQ ID NO: 117) | AGATGTGTGGGTAGAT (SEQ ID NO: 1891) |
| 339 | (SEQ ID NO: 117) | AGATGCGCGGGTAGAT (SEQ ID NO: 1890) |
| 340 | (SEQ ID NO: 117) | AGATGTGTGGGTAGAT (SEQ ID NO: 1891) |
| 341 | (SEQ ID NO: 117) | AGATAGTTCGTATTCGT (SEQ ID NO: 1892) |
| 342 | (SEQ ID NO: 117) | GTAGATAGTTTGTATTTGT (SEQ ID NO: 1893) |
| 343 | (SEQ ID NO: 117) | TTTGTTCGTAACGTTT (SEQ ID NO: 1894) |
| 344 | (SEQ ID NO: 117) | TGTTTGTAATGTTTAGAG (SEQ ID NO: 1895) |
| 345 | O60279 (SEQ ID NO: 47) | TACGTTTTTTCGGATTA (SEQ ID NO: 1898) |
| 346 | O60279 (SEQ ID NO: 47) | TATGTTTTTTTGGATTAAG (SEQ ID NO: 1899) |
| 347 | O60279 (SEQ ID NO: 47) | GGACGGCGGAAAATTA (SEQ ID NO: 1902) |
| 348 | O60279 (SEQ ID NO: 47) | AGGGATGGTGGAAAAT (SEQ ID NO: 1903) |
| 349 | SEQ ID NO: 48 (SEQ ID NO: 48) | TATTTGGCGATTCGGA (SEQ ID NO: 1904) |
| 350 | SEQ ID NO: 48 (SEQ ID NO: 48) | TGGTGATTTGGAGATT (SEQ ID NO: 1905) |
| 351 | SEQ ID NO: 48 (SEQ ID NO: 48) | TAGGGTTACGTGTCGG (SEQ ID NO: 1906) |
| 352 | SEQ ID NO: 48 (SEQ ID NO: 48) | TAGGGTTATGTGTTGG (SEQ ID NO: 1907) |
| 353 | SEQ ID NO: 48 (SEQ ID NO: 48) | TAGGGTTACGTGTCGG (SEQ ID NO: 1906) |
| 354 | SEQ ID NO: 48 (SEQ ID NO: 48) | TAGGGTTATGTGTTGG (SEQ ID NO: 1907) |
| 355 | SEQ ID NO: 48 (SEQ ID NO: 48) | AACGAATTTTTCGATATT (SEQ ID NO: 1908) |
| 356 | SEQ ID NO: 48 (SEQ ID NO: 48) | TTTAATGAATTTTTTGATATT (SEQ ID NO: |
| | | 1909) |
| 357 | SEQ ID NO: 48 (SEQ ID NO: 48) | AAAATCGTATGCGTGT (SEQ ID NO: 1910) |
| 358 | SEQ ID NO: 48 (SEQ ID NO: 48) | GAAAATTGTATGTGTGTG (SEQ ID NO: 1911) |
| 359 | SEQ ID NO: 9 (SEQ ID NO: 9) | GTTTCGCGTTTAGGGA (SEQ ID NO: 1912) |
| 360 | SEQ ID NO: 9 (SEQ ID NO: 9) | GTTTTGTGTTTAGGGAT (SEQ ID NO: 1913) |
| 361 | SEQ ID NO: 9 (SEQ ID NO: 9) | AGTGTTCGTCGTAGTT (SEQ ID NO: 1914) |
| 362 | SEQ ID NO: 9 (SEQ ID NO: 9) | TGAGTGTTTGTTGTAGT (SEQ ID NO: 1915) |
| 363 | SEQ ID NO: 4 (SEQ ID NO: 4) | TTTTGTTCGCGTTGAA (SEQ ID NO: 1916) |
| 364 | SEQ ID NO: 4 (SEQ ID NO: 4) | TTGTTTGTGTTGAAGTA (SEQ ID NO: 1917) |
| 365 | SEQ ID NO: 4 (SEQ ID NO: 4) | GGGTCGCGAGGTAGTT (SEQ ID NO: 1918) |
| 366 | SEQ ID NO: 4 (SEQ ID NO: 4) | TGGGTTGTGAGGTAGT (SEQ ID NO: 1919) |
| 367 | SEQ ID NO: 4 (SEQ ID NO: 4) | TTTGTGCGACGTTATT (SEQ ID NO: 1920) |
| 368 | SEQ ID NO: 4 (SEQ ID NO: 4) | GGTTTGTGTGATGTTAT (SEQ ID NO: 1921) |
| 369 | SEQ ID NO: 4 (SEQ ID NO: 4) | ATGGCGGTTTCGATTT (SEQ ID NO: 1922) |
| 370 | SEQ ID NO: 4 (SEQ ID NO: 4) | GATGGTGGTTTTGATTT (SEQ ID NO: 1923) |
| 371 | SEQ ID NO: 5 (SEQ ID NO: 5) | AATGAGCGAGAAAGTA (SEQ ID NO: 1924) |
| 372 | SEQ ID NO: 5 (SEQ ID NO: 5) | AGAATGAGTGAGAAAGT (SEQ ID NO: 1925) |
| 373 | SEQ ID NO: 5 (SEQ ID NO: 5) | TATGAGGTCGTATTGG (SEQ ID NO: 2163) |
| 374 | SEQ ID NO: 5 (SEQ ID NO: 5) | TATGAGGTTGTATTGGT (SEQ ID NO: 2164) |
| 375 | SEQ ID NO: 7 (SEQ ID NO: 7) | TAGTCGTCGTGTAGGA (SEQ ID NO: 1932) |
| 376 | SEQ ID NO: 7 (SEQ ID NO: 7) | TAGGTAGTTGTTGTGTA (SEQ ID NO: 1933) |
| 377 | SEQ ID NO: 7 (SEQ ID NO: 7) | TATAGGTACGCGATGA (SEQ ID NO: 1934) |
| 378 | SEQ ID NO: 7 (SEQ ID NO: 7) | AGGTATGTGATGAGGA (SEQ ID NO: 1935) |
| 379 | SEQ ID NO: 7 (SEQ ID NO: 7) | TATGGTTACGTACGAG (SEQ ID NO: 1936) |
| 380 | SEQ ID NO: 7 (SEQ ID NO: 7) | ATGGTTATGTATGAGTTT (SEQ ID NO: 1937) |
| 381 | SEQ ID NO: 7 (SEQ ID NO: 7) | ATGATTTGCGTTACGT (SEQ ID NO: 1938) |
| 382 | SEQ ID NO: 7 (SEQ ID NO: 7) | ATGATTTGTGTTATGTTT (SEQ ID NO: 1939) |
| 383 | SEQ ID NO: 7 (SEQ ID NO: 7) | TAACGTTGTGGTTCGAA (SEQ ID NO: 1940) |
| 384 | SEQ ID NO: 7 (SEQ ID NO: 7) | TAATGTTGTGGTTTGAA (SEQ ID NO: 1941) |
| 385 | SEQ ID NO: 7 (SEQ ID NO: 7) | TAACGTTGTGGTTCGAA (SEQ ID NO: 1940) |
| 386 | SEQ ID NO: 7 (SEQ ID NO: 7) | TAATGTTGTGGTTTGAA (SEQ ID NO: 1941) |
| 387 | SEQ ID NO: 1 (SEQ ID NO: 1) | GGTCGGCGTTGATTTTA (SEQ ID NO: 1942) |
| 388 | SEQ ID NO: 1 (SEQ ID NO: 1) | GGTTGGTGTTGATTTTA (SEQ ID NO: 1943) |
| 389 | SEQ ID NO: 1 (SEQ ID NO: 1) | GGTCGGCGTTGATTTTA (SEQ ID NO: 1942) |
| 390 | SEQ ID NO: 1 (SEQ ID NO: 1) | GGTTGGTGTTGATTTTA (SEQ ID NO: 1943) |
| 391 | ORPHAN NUCLEAR RECEPTOR NR5A2 | TTACGGAGGCGTTTTA (SEQ ID NO: 1958) |
| | (ALPHA-1-FETOPROTEIN | |
| | TRANSCRIPTION FACTOR) | |
| | (HEPATOCYTIC TRANSCRIPTION | |
| | FACTOR) (B1-BINDING FACTOR) | |
| | (HB1F) (CYP7A PROMOTER BINDING | |
| | FACTOR) (SEQ ID NO: 11) | |
| 392 | ORPHAN NUCLEAR RECEPTOR NR5A2 | TTTTATGGAGGTGTTTT (SEQ ID NO: 1959) |
| | (ALPHA-1-FETOPROTEIN | |
| | TRANSCRIPTION FACTOR) | |
| | (HEPATOCYTIC TRANSCRIPTION | |
| | FACTOR) (B1-BINDING FACTOR) | |
| | (HB1F) (CYP7A PROMOTER BINDING | |
| | FACTOR) (SEQ ID NO: 11) | |
| 393 | ORPHAN NUCLEAR RECEPTOR NR5A2 | AGGCGAATTTATCGGG (SEQ ID NO: 1960) |
| | (ALPHA-1-FETOPROTEIN | |
| | TRANSCRIPTION FACTOR) | |
| | (HEPATOCYTIC TRANSCRIPTION | |
| | FACTOR) (B1-BINDING FACTOR) | |
| | (HB1F) (CYP7A PROMOTER BINDING | |
| | FACTOR) (SEQ ID NO: 11) | |
| 394 | ORPHAN NUCLEAR RECEPTOR NR5A2 | GGTGAATTTATTGGGG (SEQ ID NO: 1961) |
| | (ALPHA-1-FETOPROTEIN | |
| | TRANSCRIPTION FACTOR) | |
| | (HEPATOCYTIC TRANSCRIPTION | |
| | FACTOR) (B1-BINDING FACTOR) | |
| | (HB1F) (CYP7A PROMOTER BINDING | |
| | FACTOR) (SEQ ID NO: 11) | |
| 395 | ORPHAN NUCLEAR RECEPTOR NR5A2 | TAGTCGAAGTAGGCGT (SEQ ID NO: 1962) |
| | (ALPHA-1-FETOPROTEIN | |
| | TRANSCRIPTION FACTOR) | |
| | (HEPATOCYTIC TRANSCRIPTION | |
| | FACTOR) (B1-BINDING FACTOR) | |
| | (HB1F) (CYP7A PROMOTER BINDING | |
| | FACTOR) (SEQ ID NO: 11) | |
| 396 | ORPHAN NUCLEAR RECEPTOR NR5A2 | TAGTTGAAGTAGGTGTT (SEQ ID NO: 1963) |
| | (ALPHA-1-FETOPROTEIN | |
| | TRANSCRIPTION FACTOR) | |
| | (HEPATOCYTIC TRANSCRIPTION | |
| | FACTOR) (B1-BINDING FACTOR) | |
| | (HB1F) (CYP7A PROMOTER BINDING | |
| | FACTOR) (SEQ ID NO: 11) | |
| 397 | ORPHAN NUCLEAR RECEPTOR NR5A2 | TTTTCGACGAAGTTTT (SEQ ID NO: 1964) |
| | (ALPHA-1-FETOPROTEIN | |
| | TRANSCRIPTION FACTOR) | |
| | (HEPATOCYTIC TRANSCRIPTION | |
| | FACTOR) (B1-BINDING FACTOR) | |
| | (HB1F) (CYP7A PROMOTER BINDING | |
| | FACTOR) (SEQ ID NO: 11) | |
| 398 | ORPHAN NUCLEAR RECEPTOR NR5A2 | TTTTGATGAAGTTTTGTT (SEQ ID NO: 1965) |
| | (ALPHA-1-FETOPROTEIN | |
| | TRANSCRIPTION FACTOR) | |
| | (HEPATOCYTIC TRANSCRIPTION | |
| | FACTOR) (B1-BINDING FACTOR) | |
| | (HB1F) (CYP7A PROMOTER BINDING | |
| | FACTOR) (SEQ ID NO: 11) | |
| 399 | LIM DOMAIN KINASE 1 (EC | TGTAGTCGGGAGGTTA (SEQ ID NO: 1966) |
| | 2.7.1.37) (LIMK-1) (SEQ ID NO: | |
| | 12) | |
| 400 | LIM DOMAIN KINASE 1 (EC | TGTAGTTGGGAGGTTA (SEQ ID NO: 1967) |
| | 2.7.1.37) (LIMK-1) (SEQ ID NO: | |
| | 12) | |
| 401 | LIM DOMAIN KINASE 1 (EC | TGTAGTCGGGAGGTTA (SEQ ID NO: 1966) |
| | 2.7.1.37) (LIMK-1) (SEQ ID NO: | |
| | 12) | |
| 402 | LIM DOMAIN KINASE 1 (EC | TGTAGTTGGGAGGTTA (SEQ ID NO: 1967) |
| | 2.7.1.37) (LIMK-1) (SEQ ID NO: | |
| | 12) | |
| 403 | LIM DOMAIN KINASE 1 (EC | GGATTATCGCGGGGGT (SEQ ID NO: 1968) |
| | 2.7.1.37) (LIMK-1) (SEQ ID NO: | |
| | 12) | |
| 404 | LIM DOMAIN KINASE 1 (EC | GGATTATTGTGGGGGT (SEQ ID NO: 1969) |
| | 2.7.1.37) (LIMK-1) (SEQ ID NO: | |
| | 12) | |
| 405 | LIM DOMAIN KINASE 1 (EC | GGATTATCGCGGGGGT (SEQ ID NO: 1968) |
| | 2.7.1.37) (LIMK-1) (SEQ ID NO: | |
| | 12) | |
| 406 | LIM DOMAIN KINASE 1 (EC | GGATTATTGTGGGGGT (SEQ ID NO: 1969) |
| | 2.7.1.37) (LIMK-1) (SEQ ID NO: | |
| | 12) | |
| 407 | LIM DOMAIN KINASE 1 (EC | GTCGGTAGTTTATCGGAT (SEQ ID NO: 1970) |
| | 2.7.1.37) (LIMK-1) (SEQ ID NO: | |
| | 12) | |
| 408 | LIM DOMAIN KINASE 1 (EC | GTTGGTAGTTTATTGGAT (SEQ ID NO: 1971) |
| | 2.7.1.37) (LIMK-1) (SEQ ID NO: | |
| | 12) | |
| 409 | LIM DOMAIN KINASE 1 (EC | GTCGGTAGTTTATCGGAT (SEQ ID NO: 1970) |
| | 2.7.1.37) (LIMK-1) (SEQ ID NO: | |
| | 12) | |
| 410 | LIM DOMAIN KINASE 1 (EC | GTTGGTAGTTTATTGGAT (SEQ ID NO: 1971) |
| | 2.7.1.37) (LIMK-1) (SEQ ID NO: | |
| | 12) | |
| 411 | LIM DOMAIN KINASE 1 (EC | TAGGAGACGTTACGTT (SEQ ID NO: 1972) |
| | 2.7.1.37) (LIMK-1) (SEQ ID NO: | |
| | 12) | |
| 412 | LIM DOMAIN KINASE 1 (EC | AGATGTTATGTTAGGGT (SEQ ID NO: 1973) |
| | 2.7.1.37) (LIMK-1) (SEQ ID NO: | |
| | 12) | |
| 413 | BCL11B (SEQ ID NO: 50) | TAGGTTTCGATTCGTT (SEQ ID NO: 1974) |
| 414 | BCL11B (SEQ ID NO: 50) | TTAGGTTTTGATTTGTTT (SEQ ID NO: 1975) |
| 415 | BCL11B (SEQ ID NO: 50) | AAGTCGTCGGAGTTAG (SEQ ID NO: 1976) |
| 416 | BCL11B (SEQ ID NO: 50) | GTGAAGTTGTTGGAGT (SEQ ID NO: 1977) |
| 417 | MSF (SEQ ID NO: 13) | GTTTCGAAATTGGCGT (SEQ ID NO: 1980) |
| 418 | MSF (SEQ ID NO: 13) | TTTGAAATTGGTGTGG (SEQ ID NO: 1981) |
| 419 | MSF (SEQ ID NO: 13) | TTCGGTTTACGGGTTGTA (SEQ ID NO: 1982) |
| 420 | MSF (SEQ ID NO: 13) | TTTGGTTTATGGGTTGTA (SEQ ID NO: 1983) |
| 421 | MSF (SEQ ID NO: 13) | TTCGGTTTACGGGTTGTA (SEQ ID NO: 1982) |
| 422 | MSF (SEQ ID NO: 13) | TTTGGTTTATGGGTTGTA (SEQ ID NO: 1983) |
| 423 | MSF (SEQ ID NO: 13) | TTACGGTTCGATTTTG (SEQ ID NO: 1984) |
| 424 | MSF (SEQ ID NO: 13) | TATGGTTTGATTTTGGG (SEQ ID NO: 1985) |
| 425 | SEQ ID NO: 14 (SEQ ID NO: 14) | TAAGGCGTTTTCGATA (SEQ ID NO: 1986) |
| 426 | SEQ ID NO: 14 (SEQ ID NO: 14) | GTAAGGTGTTTTTGATAT (SEQ ID NO: 1987) |
| 427 | SEQ ID NO: 16 (SEQ ID NO: 16) | AGGAGTTTTCGTGTCGT (SEQ ID NO: 1992) |
| 428 | SEQ ID NO: 16 (SEQ ID NO: 16) | AGGAGTTTTTGTGTTGT (SEQ ID NO: 1993) |
| 429 | SEQ ID NO: 16 (SEQ ID NO: 16) | AGGAGTTTTCGTGTCGT (SEQ ID NO: 1992) |
| 430 | SEQ ID NO: 16 (SEQ ID NO: 16) | AGGAGTTTTTGTGTTGT (SEQ ID NO: 1993) |
| 431 | SEQ ID NO: 17 (SEQ ID NO: 17) | TACGTTTCGGGTTTGTTA (SEQ ID NO: 1998) |
| 432 | SEQ ID NO: 17 (SEQ ID NO: 17) | TATGTTTTGGGTTTGTTA (SEQ ID NO: 1999) |
| 433 | SEQ ID NO: 17 (SEQ ID NO: 17) | TACGTTTCGGGTTTGTTA (SEQ ID NO: 1998) |
| 434 | SEQ ID NO: 17 (SEQ ID NO: 17) | TATGTTTTGGGTTTGTTA (SEQ ID NO: 1999) |
| 435 | SEQ ID NO: 17 (SEQ ID NO: 17) | ATTTAGTCGTGCGTTT (SEQ ID NO: 2000) |
| 436 | SEQ ID NO: 17 (SEQ ID NO: 17) | TGATTTAGTTGTGTGTT (SEQ ID NO: 2001) |
| 437 | SEQ ID NO: 18 (SEQ ID NO: 18) | TTTACGCGGGGTTTTA (SEQ ID NO: 2002) |
| 438 | SEQ ID NO: 18 (SEQ ID NO: 18) | TTTATGTGGGGTTTTAG (SEQ ID NO: 2003) |
| 439 | SEQ ID NO: 18 (SEQ ID NO: 18) | TTACGTCGTTATTAGGT (SEQ ID NO: 2004) |
| 440 | SEQ ID NO: 18 (SEQ ID NO: 18) | TTTTATGTTGTTATTAGGT (SEQ ID NO: 2005) |
| 441 | SEQ ID NO: 18 (SEQ ID NO: 18) | TATTTGGACGTCGGGT (SEQ ID NO: 2006) |
| 442 | SEQ ID NO: 18 (SEQ ID NO: 18) | TATTTGGATGTTGGGT (SEQ ID NO: 2007) |
| 443 | SEQ ID NO: 18 (SEQ ID NO: 18) | TATTTGGACGTCGGGT (SEQ ID NO: 2006) |
| 444 | SEQ ID NO: 18 (SEQ ID NO: 18) | TATTTGGATGTTGGGT (SEQ ID NO: 2007) |
| 445 | SEQ ID NO: 18 (SEQ ID NO: 18) | AAAGCGGAGTCGTTAG (SEQ ID NO: 2010) |
| 446 | SEQ ID NO: 18 (SEQ ID NO: 18) | AGTGGAGTTGTTAGGT (SEQ ID NO: 2011) |
| 447 | SEQ ID NO: 19 (SEQ ID NO: 19) | AGGTTTTCGTTGTAGTA (SEQ ID NO: 2012) |
| 448 | SEQ ID NO: 19 (SEQ ID NO: 19) | TAGGTTTTTGTTGTAGTA (SEQ ID NO: 2013) |
| 449 | SEQ ID NO: 19 (SEQ ID NO: 19) | TTTGATATCGAGGGAG (SEQ ID NO: 2165) |
| 450 | SEQ ID NO: 19 (SEQ ID NO: 19) | TTTGATATTGAGGGAGG (SEQ ID NO: 2166) |
| 451 | SEQ ID NO: 19 (SEQ ID NO: 19) | GGTGTACGGAGGAAAG (SEQ ID NO: 2167) |
| 452 | SEQ ID NO: 19 (SEQ ID NO: 19) | GGTGTATGGAGGAAAG (SEQ ID NO: 2168) |
| 453 | SEQ ID NO: 19 (SEQ ID NO: 19) | GGTGTACGGAGGAAAG (SEQ ID NO: 2167) |
| 454 | SEQ ID NO: 19 (SEQ ID NO: 19) | GGTGTATGGAGGAAAG (SEQ ID NO: 2168) |
| 455 | SEQ ID NO: 19 (SEQ ID NO: 19) | TGAGATTCGTTTTTTAAA (SEQ ID NO: 2014) |
| 456 | SEQ ID NO: 19 (SEQ ID NO: 19) | GGTGAGATTTGTTTTTTA (SEQ ID NO: 2015) |
| 457 | PRDM6 (SEQ ID NO: 20) | TTGTCGGGTTACGGGA (SEQ ID NO: 2020) |
| 458 | PRDM6 (SEQ ID NO: 20) | GTTGGGTTATGGGAGA (SEQ ID NO: 2021) |
| 459 | PRDM6 (SEQ ID NO: 20) | TTCGTAGAATTGTCGAAG (SEQ ID NO: 2022) |
| 460 | PRDM6 (SEQ ID NO: 20) | TTTGTAGAATTGTTGAAG (SEQ ID NO: 2023) |
| 461 | PRDM6 (SEQ ID NO: 20) | TTCGTAGAATTGTCGAAG (SEQ ID NO: 2022) |
| 462 | PRDM6 (SEQ ID NO: 20) | TTTGTAGAATTGTTGAAG (SEQ ID NO: 2023) |
| 463 | NR2E1 (SEQ ID NO: 22) | AATGTAGCGGCGTTAT (SEQ ID NO: 2028) |
| 464 | NR2E1 (SEQ ID NO: 22) | TAAATGTAGTGGTGTTAT (SEQ ID NO: 2029) |
| 465 | NR2E1 (SEQ ID NO: 22) | GTCGTTATCGGTTTGGA (SEQ ID NO: 2030) |
| 466 | NR2E1 (SEQ ID NO: 22) | GTTGTTATTGGTTTGGA (SEQ ID NO: 2031) |
| 467 | NR2E1 (SEQ ID NO: 22) | GTCGTTATCGGTTTGGA (SEQ ID NO: 2030) |
| 468 | NR2E1 (SEQ ID NO: 22) | GTTGTTATTGGTTTGGA (SEQ ID NO: 2031) |
| 469 | NR2E1 (SEQ ID NO: 22) | GACGTAAGTTTCGGGT (SEQ ID NO: 2032) |
| 470 | NR2E1 (SEQ ID NO: 22) | GGATGTAAGTTTTGGG (SEQ ID NO: 2033) |
| 471 | NR2E1 (SEQ ID NO: 22) | TTTTTAGTCGCGAGAA (SEQ ID NO: 2034) |
| 472 | NR2E1 (SEQ ID NO: 22) | TTTTTAGTTGTGAGAAGT (SEQ ID NO: 2035) |
| 473 | NR2E1 (SEQ ID NO: 22) | TTCGGGTGATATCGTTT (SEQ ID NO: 2036) |
| 474 | NR2E1 (SEQ ID NO: 22) | TTTGGGTGATATTGTTT (SEQ ID NO: 2037) |
| 475 | NR2E1 (SEQ ID NO: 22) | TTCGGGTGATATCGTTT (SEQ ID NO: 2036) |
| 476 | NR2E1 (SEQ ID NO: 22) | TTTGGGTGATATTGTTT (SEQ ID NO: 2037) |
| 477 | NR2E1 (SEQ ID NO: 22) | AGGCGAGTCGGAGTTT (SEQ ID NO: 2038) |
| 478 | NR2E1 (SEQ ID NO: 22) | AGGTGAGTTGGAGTTTT (SEQ ID NO: 2039) |
| 479 | NR2E1 (SEQ ID NO: 22) | TAAGTCGAGCGAGTTT (SEQ ID NO: 2040) |
| 480 | NR2E1 (SEQ ID NO: 22) | TAGTAAGTTGAGTGAGT (SEQ ID NO: 2041) |
| 481 | NR2E1 (SEQ ID NO: 22) | AGGGACGCGAAAATTT (SEQ ID NO: 2042) |
| 482 | NR2E1 (SEQ ID NO: 22) | GGAGGGATGTGAAAAT (SEQ ID NO: 2043) |
| 483 | PCDH7 (SEQ ID NO: 23) | ATCGTAGTCGGTTTTA (SEQ ID NO: 2044) |
| 484 | PCDH7 (SEQ ID NO: 23) | GATTATTGTAGTTGGTTT (SEQ ID NO: 2045) |
| 485 | RTTN (SEQ ID NO: 25) | TAGGACGTGTTTTCGG (SEQ ID NO: 2048) |
| 486 | RTTN (SEQ ID NO: 25) | AGGATGTGTTTTTGGG (SEQ ID NO: 2049) |
| 487 | SNAP25 (SEQ ID NO: 33) | TATTTCGAGTTAGAGTTACGA (SEQ ID NO: |
| | | 2050) |
| 488 | SNAP25 (SEQ ID NO: 33) | TATTTTGAGTTAGAGTTATGA (SEQ ID NO: |
| | | 2051) |
| 489 | SNAP25 (SEQ ID NO: 33) | TATTTCGAGTTAGAGTTACGA (SEQ ID NO: |
| | | 2050) |
| 490 | SNAP25 (SEQ ID NO: 33) | TATTTTGAGTTAGAGTTATGA (SEQ ID NO: |
| | | 2051) |
| 491 | SNAP25 (SEQ ID NO: 33) | ATACGGAATATCGTATTT (SEQ ID NO: 2052) |
| 492 | SNAP25 (SEQ ID NO: 33) | GTGTATATATGGAATATTGT (SEQ ID NO: |
| | | 2053) |
| 493 | SNAP25 (SEQ ID NO: 33) | GTTATTATTCGGTACGT (SEQ ID NO: 2169) |
| 494 | SNAP25 (SEQ ID NO: 33) | AGTTATTATTTGGTATGTAT (SEQ ID NO: |
| | | 2170) |
| 495 | SEQ ID NO: 26 (SEQ ID NO: 26) | TTAAGTATCGAGGCGT (SEQ ID NO: 2054) |
| 496 | SEQ ID NO: 26 (SEQ ID NO: 26) | TTTTAAGTATTGAGGTGT (SEQ ID NO: 2055) |
| 497 | SEQ ID NO: 26 (SEQ ID NO: 26) | AATTTTGGTCGTTTAGT (SEQ ID NO: 2056) |
| 498 | SEQ ID NO: 26 (SEQ ID NO: 26) | AAATTTTGGTTGTTTAGT (SEQ ID NO: 2057) |
| 499 | GIRK2 (SEQ ID NO: 27) | AGTTGTTCGTAGGCGA (SEQ ID NO: 2060) |
| 500 | GIRK2 (SEQ ID NO: 27) | AGTTGTTTGTAGGTGA (SEQ ID NO: 2061) |
| 501 | GIRK2 (SEQ ID NO: 27) | AGTTGTTCGTAGGCGA (SEQ ID NO: 2060) |
| 502 | GIRK2 (SEQ ID NO: 27) | AGTTGTTTGTAGGTGA (SEQ ID NO: 2061) |
| 503 | GIRK2 (SEQ ID NO: 27) | TTATTTCGTTCGTAGTT (SEQ ID NO: 2062) |
| 504 | GIRK2 (SEQ ID NO: 27) | TTTGTTTGTAGTTAGGTA (SEQ ID NO: 2063) |
| 505 | GIRK2 (SEQ ID NO: 27) | TTAGTCGAAAGGCGAG (SEQ ID NO: 2064) |
| 506 | GIRK2 (SEQ ID NO: 27) | TAGTTGAAAGGTGAGG (SEQ ID NO: 2065) |
| 507 | SEQ ID NO: 28 (SEQ ID NO: 28) | ATTAGGCGAGTTTCGT (SEQ ID NO: 2066) |
| 508 | SEQ ID NO: 28 (SEQ ID NO: 28) | TTAGGTGAGTTTTGTTT (SEQ ID NO: 2067) |
| 509 | SEQ ID NO: 31 (SEQ ID NO: 31) | TTTACGTAGGGCGATT (SEQ ID NO: 2068) |
| 510 | SEQ ID NO: 31 (SEQ ID NO: 31) | ATTTTTATGTAGGGTGAT (SEQ ID NO: 2069) |
| 511 | SEQ ID NO: 31 (SEQ ID NO: 31) | GATACGGTTAGGCGGG (SEQ ID NO: 2070) |
| 512 | SEQ ID NO: 31 (SEQ ID NO: 31) | GATATGGTTAGGTGGG (SEQ ID NO: 2071) |
| 513 | SEQ ID NO: 31 (SEQ ID NO: 31) | GATACGGTTAGGCGGG (SEQ ID NO: 2070) |
| 514 | SEQ ID NO: 31 (SEQ ID NO: 31) | GATATGGTTAGGTGGG (SEQ ID NO: 2071) |
| 515 | SEQ ID NO: 31 (SEQ ID NO: 31) | TTCGGGCGTTTTATAT (SEQ ID NO: 2072) |
| 516 | SEQ ID NO: 31 (SEQ ID NO: 31) | GGTTTGGGTGTTTTATA (SEQ ID NO: 2073) |
| 517 | HOXB13 (SEQ ID NO: 34) | GTCGTTATTATTTCGAGG (SEQ ID NO: 2074) |
| 518 | HOXB13 (SEQ ID NO: 34) | GTTGTTATTATTTTGAGGA (SEQ ID NO: 2075) |
| 519 | HOXB13 (SEQ ID NO: 34) | AAGTTAGCGGGTTCGT (SEQ ID NO: 2076) |
| 520 | HOXB13 (SEQ ID NO: 34) | AAGTTAGTGGGTTTGT (SEQ ID NO: 2077) |
| 521 | HOXB13 (SEQ ID NO: 34) | AAGTTAGCGGGTTCGT (SEQ ID NO: 2076) |
| 522 | HOXB13 (SEQ ID NO: 34) | AAGTTAGTGGGTTTGT (SEQ ID NO: 2077) |
| 523 | HOXB13 (SEQ ID NO: 34) | TTGGTCGCGTAGTAAA (SEQ ID NO: 2078) |
| 524 | HOXB13 (SEQ ID NO: 34) | TGGTTGTGTAGTAAAGT (SEQ ID NO: 2079) |
| 525 | (SEQ ID NO: 35) | AAATAGTCGTTTGGGA (SEQ ID NO: 2082) |
| 526 | (SEQ ID NO: 35) | AAATAGTTGTTTGGGAG (SEQ ID NO: 2083) |
| 527 | (SEQ ID NO: 35) | TAAAGACGGGAAGAGA (SEQ ID NO: 2086) |
| 528 | (SEQ ID NO: 35) | ATAAAGATGGGAAGAGA (SEQ ID NO: 2087) |
| 529 | MGC10561 (SEQ ID NO: 37) | ATATTTAGCGTAGTTATTT (SEQ ID NO: 2171) |
| 530 | MGC10561 (SEQ ID NO: 37) | TAGTATATTTAGTGTAGTTAT (SEQ ID NO: |
| | | 2172) |
| 531 | LMX1A (SEQ ID NO: 38) | GTCGGGTTTTTCGGAA (SEQ ID NO: 2092) |
| 532 | LMX1A (SEQ ID NO: 38) | GTTGGGTTTTTTGGAAG (SEQ ID NO: 2093) |
| 533 | LMX1A (SEQ ID NO: 38) | GTCGAGATTTTATCGAAA (SEQ ID NO: 2094) |
| 534 | LMX1A (SEQ ID NO: 38) | GTTGAGATTTTATTGAAAG (SEQ ID NO: 2095) |
| 535 | LMX1A (SEQ ID NO: 38) | AGTATTCGGGCGGGTA (SEQ ID NO: 2096) |
| 536 | LMX1A (SEQ ID NO: 38) | GTAGTATTTGGGTGGG (SEQ ID NO: 2097) |
| 537 | LMX1A (SEQ ID NO: 38) | AACGAAATTACGTGTAT (SEQ ID NO: 2098) |
| 538 | LMX1A (SEQ ID NO: 38) | TGAAATGAAATTATGTGTA (SEQ ID NO: 2099) |
| 539 | GS1 (SEQ ID NO: 40) | TGCGAGTTAGCGGTTA (SEQ ID NO: 2100) |
| 540 | GS1 (SEQ ID NO: 40) | TTGTGAGTTAGTGGTT (SEQ ID NO: 2101) |
| 541 | TITF1 (SEQ ID NO: 41) | GTCGTGGGGATCGTAT (SEQ ID NO: 2104) |
| 542 | TITF1 (SEQ ID NO: 41) | GTTGTGGGGATTGTAT (SEQ ID NO: 2105) |
| 543 | TITF1 (SEQ ID NO: 41) | GTCGTGGGGATCGTAT (SEQ ID NO: 2104) |
| 544 | TITF1 (SEQ ID NO: 41) | GTTGTGGGGATTGTAT (SEQ ID NO: 2105) |
| 545 | TITF1 (SEQ ID NO: 41) | GGTTCGTTTAAGTTCGG (SEQ ID NO: 2106) |
| 546 | TITF1 (SEQ ID NO: 41) | GGTTTGTTTAAGTTTGG (SEQ ID NO: 2107) |
| 547 | TITF1 (SEQ ID NO: 41) | GGTTCGTTTAAGTTCGG (SEQ ID NO: 2106) |
| 548 | TITF1 (SEQ ID NO: 41) | GGTTTGTTTAAGTTTGG (SEQ ID NO: 2107) |
| 549 | TITF1 (SEQ ID NO: 41) | TTAGGTCGCGTTTGTA (SEQ ID NO: 2108) |
| 550 | TITF1 (SEQ ID NO: 41) | AGGTTGTGTTTGTAGA (SEQ ID NO: 2109) |
| 551 | TITF1 (SEQ ID NO: 41) | TATTTCGTTTTCGTAATT (SEQ ID NO: 2110) |
| 552 | TITF1 (SEQ ID NO: 41) | TTTGTTTTTGTAATTAGATT (SEQ ID NO: |
| | | 2111) |
| 553 | DDX51 (SEQ ID NO: 43) | TAGGCGAGCGTTAGGT (SEQ ID NO: 2173) |
| 554 | DDX51 (SEQ ID NO: 43) | GGTGAGTGTTAGGTTA (SEQ ID NO: 2174) |
| 555 | DDX51 (SEQ ID NO: 43) | AACGTGCGGGGTTTTT (SEQ ID NO: 2116) |
| 556 | DDX51 (SEQ ID NO: 43) | TGAATGTGTGGGGTTT (SEQ ID NO: 2117) |
| 557 | SEQ ID NO: 45 (SEQ ID NO: 45) | TGTAGTATCGGGGGAG (SEQ ID NO: 2175) |
| 558 | SEQ ID NO: 45 (SEQ ID NO: 45) | TGTAGTATTGGGGGAG (SEQ ID NO: 2176) |
| 559 | SEQ ID NO: 45 (SEQ ID NO: 45) | TGTAGTATCGGGGGAG (SEQ ID NO: 2175) |
| 560 | SEQ ID NO: 45 (SEQ ID NO: 45) | TGTAGTATTGGGGGAG (SEQ ID NO: 2176) |
| 561 | SEQ ID NO: 46 (SEQ ID NO: 46) | GAGTCGGGTTATCGTT (SEQ ID NO: 2120) |
| 562 | SEQ ID NO: 46 (SEQ ID NO: 46) | GGAGTTGGGTTATTGT (SEQ ID NO: 2121) |
| 563 | SEQ ID NO: 46 (SEQ ID NO: 46) | TTACGGATGTTTCGGT (SEQ ID NO: 2122) |
| 564 | SEQ ID NO: 46 (SEQ ID NO: 46) | TTTATGGATGTTTTGGT (SEQ ID NO: 2123) |
| 565 | SEQ ID NO: 46 (SEQ ID NO: 46) | TGACGTATTTTCGGTT (SEQ ID NO: 2124) |
| 566 | SEQ ID NO: 46 (SEQ ID NO: 46) | GGTGATGTATTTTTGGT (SEQ ID NO: 2125) |
| 567 | SEQ ID NO: 46 (SEQ ID NO: 46) | ATAGTCGGAATCGTTG (SEQ ID NO: 2126) |
| 568 | SEQ ID NO: 46 (SEQ ID NO: 46) | TAGTTGGAATTGTTGTT (SEQ ID NO: 2127) |
| 569 | SEQ ID NO: 2 (SEQ ID NO: 2) | ATTGGGTTTCGCGTAGG (SEQ ID NO: 2128) |
| 570 | SEQ ID NO: 2 (SEQ ID NO: 2) | ATTGGGTTTTGTGTAGG (SEQ ID NO: 2129) |
| 571 | SEQ ID NO: 2 (SEQ ID NO: 2) | ATTGGGTTTCGCGTAGG (SEQ ID NO: 2128) |
| 572 | SEQ ID NO: 2 (SEQ ID NO: 2) | ATTGGGTTTTGTGTAGG (SEQ ID NO: 2129) |
| 573 | SEQ ID NO: 2 (SEQ ID NO: 2) | TAGTAGTCGGCGGGAG (SEQ ID NO: 2130) |
| 574 | SEQ ID NO: 2 (SEQ ID NO: 2) | TAGTAGTTGGTGGGAG (SEQ ID NO: 2131) |
| 575 | SEQ ID NO: 2 (SEQ ID NO: 2) | TAGTAGTCGGCGGGAG (SEQ ID NO: 2130) |
| 576 | SEQ ID NO: 2 (SEQ ID NO: 2) | TAGTAGTTGGTGGGAG (SEQ ID NO: 2131) |
| 577 | SEQ ID NO: 3 (SEQ ID NO: 3) | TTGCGTTAATTCGGTA (SEQ ID NO: 2132) |
| 578 | SEQ ID NO: 3 (SEQ ID NO: 3) | AATTTGTGTTAATTTGGT (SEQ ID NO: 2133) |
| 579 | SEQ ID NO: 3 (SEQ ID NO: 3) | AGTCGGGAGAGCGAAA (SEQ ID NO: 2134) |
| 580 | SEQ ID NO: 3 (SEQ ID NO: 3) | AGTTGGGAGAGTGAAA (SEQ ID NO: 2135) |
| 581 | SEQ ID NO: 3 (SEQ ID NO: 3) | AGTCGGGAGAGCGAAA (SEQ ID NO: 2134) |
| 582 | SEQ ID NO: 3 (SEQ ID NO: 3) | AGTTGGGAGAGTGAAA (SEQ ID NO: 2135) |
| 583 | SEQ ID NO: 3 (SEQ ID NO: 3) | GGTCGAAGAGTCGGGA (SEQ ID NO: 2136) |
| 584 | SEQ ID NO: 3 (SEQ ID NO: 3) | GGTTGAAGAGTTGGGA (SEQ ID NO: 2137) |
| 585 | SEQ ID NO: 3 (SEQ ID NO: 3) | GGTCGAAGAGTCGGGA (SEQ ID NO: 2136) |
| 586 | SEQ ID NO: 3 (SEQ ID NO: 3) | GGTTGAAGAGTTGGGA (SEQ ID NO: 2137) |
| 587 | SEQ ID NO: 3 (SEQ ID NO: 3) | ATGTTAGCGGGTCGAA (SEQ ID NO: 2138) |
| 588 | SEQ ID NO: 3 (SEQ ID NO: 3) | ATGTTAGTGGGTTGAA (SEQ ID NO: 2139) |
| 589 | SEQ ID NO: 3 (SEQ ID NO: 3) | ATGTTAGCGGGTCGAA (SEQ ID NO: 2138) |
| 590 | SEQ ID NO: 3 (SEQ ID NO: 3) | ATGTTAGTGGGTTGAA (SEQ ID NO: 2139) |

TABLE 21

| | | | | | | | % of |
|---|---|---|---|---|---|---|---|
| | | | | | Syber | % of | samples |
| | | | | | green | samples | methylated |
| Genomic | Primer | Primer | | | detection | methylated | (Syber |
| SEQ ID | SEQ ID | SEQ ID | Probe SEQ | Syber | Temperatire | (Probe | green |
| NO: | NO: | NO: | ID NO: | green | ° C. | detection) | detection) |
| 20 | 2223 | 2224 | 2225 | No | | 91 | |
| 24 | 2226 | 2227 | 2228 | Yes | 85° C. | 30 | 30 |
| 13 | 2229 | 2230 | | Yes | 81° C. | | 36 |
| 13 | 2239 | 2240 | 2241 | | | 47 | |
| 15 | 2231 | 2232 | 2233 | No | | 40 | |
| 22 | 2233 | 2234 | | Yes | 81° C. | | 72 |
| 22 | 2236 | 2237 | 2238 | | | 68 | |

TABLE 22
Primers and oligonucleotides according to Example 2

| Genomic | | | | | | |
|---|---|---|---|---|---|---|
| SEQ ID | | | | | | |
| NO: | Assay | Primer 1 | Primer 2 | Probe 1 | Probe 2 | Blocker |
| SEQ ID | MSP | CGcacttaaa | tgttgtgtta | cgtagggtcg | | |
| NO: 104 | | ataaaaacac | CGaggtggat | tgcgggatcg | | |
| (Assay 4) | | taCG | tC | SEQ ID NO: | | |
| | | SEQ ID NO: | SEQ ID NO: | 2244 | | |
| | | 2242 | 2243 | | | |
| SEQ ID | MSP | CCACCTCGAT | AGTAGGCGTG | CGGCGGTTTT | | |
| NO: | | AAATTAAAAA | TAAGGGTTTC | TTGTTCGGGT | | |
| 77 (Assay | | ATAAAC | SEQ ID NO: | TGTC | | |
| 1-5) | | SEQ ID NO: | 2246 | SEQ ID NO: | | |
| | | 2245 | | 2247 | | |
| SEQ ID | MSP | CCCGACTAAA | TTTTAGATGA | CGTGTGCGTG | | |
| NO: 90 | | ACGTACCAAC | AGTCGTTATA | GCGGGTTTC | | |
| (Assay 1) | | SEQ ID NO: | GAGGTC | SEQ ID NO: | | |
| | | 2248 | SEQ ID NO: | 2250 | | |
| | | | 2249 | | | |
| SEQ ID | MSP | cggttgttgt | gcaaaacaca | Cgcgtgtgta | | |
| NO: 4 | | aggcgtc | cgaaaacg | ggtcgcgcgt | | |
| (Assay 1) | | SEQ ID NO: | SEQ ID NO: | SEQ ID NO: | | |
| | | 2251 | 2252 | 2253 | | |
| SEQ ID | MSP | AAAATCCTCT | CGCGATTCGT | CGGATTTCGC | | |
| NO: 13 | | CCAACACGTC | TGTTTATTAG | GGTTAACGCG | | |
| (Assay 2) | | SEQ ID NO: | SEQ ID NO: | TAGTT | | |
| | | 2256 | 2257 | SEQ ID NO: | | |
| | | | | 2258 | | |
| SEQ ID | HeavyMethyl | CCAAAACCTA | GGAAATTTGA | GGCGATCGAG | Red640GCGG | TACAACACCA |
| NO: 15 | | AACTTACAAC | GGGGTAA | GCGTCGT- | GTGGGGAGCG | CCAACAAACC |
| (Assay 5) | | SEQ ID NO: | SEQ ID NO: | fluo | AG-pho | CAAAAACACA |
| | | 2259 | 2260 | SEQ ID NO: | SEQ ID NO: | A-pho |
| | | | | 2261 | 2262 | SEQ ID NO: |
| | | | | | | 2263 |
| SEQ ID | MSP | CTACCTCCAC | AAGCGTTTTT | TACGTCGTTG | | |
| NO: 20 | | CGCGAC | TAGAGCGC | CGCGTTTTTG | | |
| (Assay o) | | SEQ ID NO: | SEQ ID NO: | TGC | | |
| | | 2264 | 2265 | SEQ ID NO: | | |
| | | | | 2266 | | |
| SEQ ID | MSP | TGTTATTTAG | ATCTATCCGT | CGTTTTTCGC | | |
| NO: 38 | | ACGTTTACGA | CAATACTTAT | GGTTTTGGGG | | |
| (Assay 3) | | ATAAGTTC | AAATCG | AATTC | | |
| | | SEQ ID NO: | SEQ ID NO: | SEQ ID NO: | | |
| | | 2267 | 2268 | 2269 | | |
| SEQ ID | MSP | AcaccCGtaa | AtttttagCG | Cggtaagcgt | | |
| NO: 3 | | actccttCG | agtCGagttt | tcgaaagtcg | | |
| (Assay 8) | | SEQ ID NO: | tC SEQ ID | ggt | | |
| | | 2270 | NO: 2271 | SEQ ID NO: | | |
| | | | | 2272 | | |
| SEQ ID | MSP | Aaatacaaaa | Gaggcgtttg | GCGgaaCGgC | | |
| NO: 29 | | acgaaaaacc | agagattttc | GCGtga SEQ | | |
| (Assay 2) | | g SEQ ID | SEQ ID NO: | ID NO: | | |
| | | NO: 2273 | 2274 | 2275 | | |
| SEQ ID | MSP | Ggcgagggaa | Catttaacaa | Ttttaggaaa | | |
| NO: 22 | | gttaagaac | accgaacga | tttcggttcg | | |
| (Assay o) | | SEQ ID NO: | SEQ ID NO: | ttttacgtcg | | |
| | | 2276 | 2277 | g SEQ ID | | |
| | | | | NO: 2278 | | |
| SEQ ID | MSP | Aaggatttgg | Ccgccctcct | Cgtaggtagc | | |
| NO: 115 | | gatttacgat | aaaactctac | ggcgggggcg | | |
| (Assay 1) | | c SEQ ID | SEQ ID NO: | SEQ ID NO: | | |
| | | NO: 2279 | 2280 | 2281 | | |
| SEQ ID | MSP | Aaactccgaa | Agtgagtaga | CGCGttCGtt | | |
| NO: 112 | | aactaaaaaa | gtttagagtc | tCGtgtattt | | |
| (Assay 2- | | cg SEQ ID | gtgc SEQ | tCGC SEQ | | |
| 2) | | NO: 2282 | ID NO: | ID NO: | | |
| | | | 2283 | 2284 | | |
| SEQ ID | HM | Cacaaactat | Gattgttgtt | TCgTCTCTTA | Red640- | ctcaaacaca |
| NO: 6 | | ctataaaaaa | ggtgtttgtt | AACCgCTTTC | CCTCAAAATA | aaaaaattaa |
| (Assay 5) | | ttaatctc | att SEQ ID | gA-fluo | AACACgAACA | catctcatct |
| | | SEQ ID NO: | NO: 2286 | SEQ ID NO: | TACCC-pho | cttaaaccac |
| | | 2285 | | 2287 | SEQ ID NO: | tttcaat- |
| | | | | | 2288 | pho |
| | | | | | | SEQ ID NO: |
| | | | | | | 2297 |
| SEQ ID | MSP | Ttaaaactaa | Ggaggttagt | CgtttagCGt | | |
| NO: 98 | | acgaccaaaa | tattttcgga | ttggggaCGt | | |
| (Assay 2) | | acg | gtc SEQ ID | CGatttC | | |
| | | SEQ ID NO: | NO: 2290 | SEQ ID NO: | | |
| | | 2289 | | 2291 | | |
| SEQ ID | HM | Tttggagaaa | Aaaatcaaaa | Cggaattgta | red640- | Acctcccacc |
| NO: 22 | | gagggat | attacacctc | gagcgtcggt | gttttttttt | ctccactcaa |
| (Assay 2) | | SEQ ID NO: | SEQ ID NO: | ta-fluo | tcgcgaacgt | cattca-ph |
| | | 2292 | 2293 | SEQ ID NO: | cg-ph | SEQ ID NO: |
| | | | | 2294 | SEQ ID NO: | 2296 |
| | | | | | 2295 | |

TABLE 23

| Genomic | | | | | |
|---|---|---|---|---|---|
| SEQ ID | FIG. | | | | Wilcoxon |
| NO: | No. | AUC | Sensitivity | Specificity | p-value |
| SEQ ID | 6 | 0.62 (0.41, | 0.29 | 0.9 | 0.2664 |
| NO: 104 | | 0.81) | | | |
| (Assay 4) | | | | | |
| SEQ ID | 5 | 0.93 (0.73, | 0.93 | 0.9 | 1e−04 |
| NO: | | 0.99) | | | |
| 77(Assay | | | | | |
| 1-5) | | | | | |
| SEQ ID | 4 | 0.9 (0.73, | 1 | 0.9 | 8e−04 |
| NO: 90 | | 0.99) | | | |
| (Assay 1) | | | | | |
| SEQ ID | 9 | 0.96 (0.79, 1) | 0.93 | 1 | 1e−04 |
| NO: 13 | | | | | |
| (Assay 2) | | | | | |
| SEQ ID | 8 | 1 (0.86, 1) | 1 | 0.9 | 0 |
| NO: 20 | | | | | |
| (Assay o) | | | | | |
| SEQ ID | 7 | 1 (0.86. 1) | 1 | 0.9 | 0 |
| NO: 38 | | | | | |
| (Assay 3) | | | | | |
| SEQ ID | 1 | 0.95 (0.79, 1) | 0.93 | 0.9 | 2e−04 |
| NO: 4 | | | | | |
| (Assay 1) | | | | | |
| SEQ ID | 3 | 0.91 (0.73, | 0.93 | 0.9 | 4e−04 |
| NO: 29 | | 0.99) | | | |
| (Assay 2) | | | | | |
| SEQ ID | 12 | 0.95 (0.79, 1) | 0.93 | 0.9 | 2e−04 |
| NO: 115 | | | | | |
| (Assay 1) | | | | | |
| SEQ ID | 10 | 0.93 | 0.86 | 0.9 | 5e−04 |
| NO: 112 | | (0.73, 0.99) | | | |
| (Assay 2- | | | | | |
| 2-5) | | | | | |
| SEQ ID | 11 | 0.89 | 0.86 | 0.9 | 0.0011 |
| NO: 98 | | (0.68, 0.97) | | | |
| (Assay 2) | | | | | |
| SEQ ID | 2 | 0.99 (0.8, 1) | 0.93 | 0.9 | 1e−04 |
| NO: 22 | | | | | |
| (Assay o) | | | | | |

TABLE 24
Assay performance in Other cancer vs. Breast cancer detection

| Genomic | FIG. | | | | Wilcoxon |
|---|---|---|---|---|---|
| SEQ ID NO: | No. | AUC | Sensitivity | Specificity | p-value |
| SEQ ID NO: | 16 | 0.75 (0.6, | 0.67 | 0.88 | 8e−04 |
| 104 (Assay | | 0.86) | | | |
| 4) | | | | | |
| SEQ ID NO: | 17 | 0.44 (0.29, | 0 | 0.88 | 0.516 |
| 77(Assay | | 0.59) | | | |
| 1-5) | | | | | |
| SEQ ID NO: | 13 | 0.8 (0.65, | 0.54 | o.88 | 4e−04 |
| 90 (Assay | | 0.9) | | | |
| 1) | | | | | |
| SEQ ID NO: | 15 | 0.66 (0.49, | 0.29 | 0.92 | 0.1239 |
| 13 (Assay | | 0.81) | | | |
| 2) | | | | | |
| SEQ ID NO: | 18 | 0.65 (0.49, | 0.25 | 0.88 | 0.0852 |
| 20 (Assay | | 0.78) | | | |
| o) | | | | | |
| SEQ ID NO: | 14 | 0.79 (0.65, | 0.54 | 0.88 | 4e−04 |
| 38 (Assay | | 0.9) | | | |
| 3) | | | | | |

TABLE 25
Patient samples according to Example 1

| Sub Diagnosis | # used |
|---|---|
| Early sporadic breast | 259 |
| cancer | |
| IDCT1N0postER+ | 24 |
| IDCT1N0postER− | 25 |
| IDCT1N0preER+ | 24 |
| IDCT1N0preER− | 24 |
| IDCT1N12postER+ | 27 |
| IDCT1N12postER− | 24 |
| IDCT1N12preER+ | 24 |
| IDCT1N12preER− | 24 |
| ILC caucasian ER+ T1N0 | 16 |
| ILC caucasian ER+ T1N12 | 8 |
| DCIS caucasian ER+/− | 39 |
| genetic breast cancer | 23 |
| BRCA1 | 23 |
| Benign breast conditions | 84 |
| fibroadenoma | 45 |
| fibrocystic disease | 6 |
| ductal hyperplasia | 3 |
| normal breast epithelium | 12 |
| normal breast tissue | 18 |
| Other cancers | 75 |
| colon | 13 |
| lung | 19 |
| endometrial | 16 |
| ovarian | 16 |
| others | 11 |
| Lymphocyte controls | 34 |
| age group old | 13 |
| age group young | 13 |
| male controls | 8 |
| Total | 475 |

TABLE 26

| | | Sense | Antisense | Sense | Antisense |
|---|---|---|---|---|---|
| | Genomic | methylated | methylated | unmethylated | unmethylated |
| | SEQ ID | converted | converted | converted SEQ | converted SEQ |
| Gene | NO: | SEQ ID NO: | SEQ ID NO: | ID NO: | ID NO: |
| Genomic | 4 | 499 | 500 | 735 | 736 |
| region | | | | | |
| Genomic | 7 | 505 | 506 | 741 | 742 |
| region | | | | | |
| Genomic | 9 | 509 | 510 | 745 | 746 |
| region | | | | | |
| ORPHAN | 11 | 513 | 514 | 749 | 750 |
| NUCLEAR | | | | | |
| RECEPTOR | | | | | |
| NR5A2 | | | | | |
| Genomic | 14 | 519 | 520 | 755 | 756 |
| region | | | | | |
| Genomic | 16 | 523 | 524 | 759 | 760 |
| region | | | | | |
| Genomic | 17 | 525 | 526 | 761 | 762 |
| region | | | | | |
| Genomic | 19 | 529 | 530 | 765 | 766 |
| region | | | | | |
| PRDM6 | 20 | 531 | 532 | 767 | 768 |
| DKK3 | 24 | 539 | 540 | 775 | 776 |
| GIRK2 | 27 | 545 | 546 | 781 | 782 |
| Genomic | 28 | 547 | 548 | 783 | 784 |
| region | | | | | |
| Genomic | 29 | 549 | 550 | 785 | 786 |
| region | | | | | |
| Genomic | 36 | 563 | 564 | 799 | 800 |
| region | | | | | |
| GS1 | 40 | 571 | 572 | 807 | 808 |
| SEQ ID NO: 42 | 42 | 575 | 576 | 811 | 812 |
| DDX51 | 43 | 577 | 578 | 813 | 814 |
| Genomic | 46 | 583 | 584 | 819 | 820 |
| region | | | | | |
| Genomic | 48 | 587 | 588 | 823 | 824 |
| region | | | | | |
| BCL11B | 50 | 591 | 592 | 827 | 828 |
| Genomic | 51 | 593 | 594 | 829 | 830 |
| region | | | | | |
| MGC34831 | 52 | 595 | 596 | 831 | 832 |
| CDKN2A | 57 | 605 | 606 | 841 | 842 |
| APC | 65 | 621 | 622 | 857 | 858 |
| SERPINB5 | 68 | 627 | 628 | 863 | 864 |
| CASP8 | 71 | 633 | 634 | 869 | 870 |
| SNCG | 73 | 637 | 638 | 873 | 874 |
| ESR1 | 75 | 641 | 642 | 877 | 878 |
| FABP3 | 77 | 645 | 646 | 881 | 882 |
| PGR | 83 | 657 | 658 | 893 | 894 |
| TP73 | 86 | 663 | 664 | 899 | 900 |
| RARB | 88 | 667 | 668 | 903 | 904 |
| MLH1 | 89 | 669 | 670 | 905 | 906 |
| ESR2 | 91 | 673 | 674 | 909 | 910 |
| TERT | 92 | 675 | 676 | 911 | 912 |
| TGFBR2 | 93 | 677 | 678 | 913 | 914 |
| S100A7 | 96 | 683 | 684 | 919 | 920 |
| DAPK1 | 98 | 687 | 688 | 923 | 924 |
| MCT1 | 101 | 693 | 694 | 929 | 930 |
| SASH1 | 102 | 695 | 696 | 931 | 932 |
| SOD2 | 105 | 701 | 702 | 937 | 938 |
| NME1 | 107 | 705 | 706 | 941 | 942 |
| RARA | 108 | 707 | 708 | 943 | 944 |
| GJB2 | 111 | 713 | 714 | 949 | 950 |
| HS3ST2 | 113 | 717 | 718 | 953 | 954 |
| SLC19A1 | 116 | 723 | 724 | 959 | 960 |
| Genomic | 117 | 725 | 726 | 961 | 962 |
| region | | | | | |

TABLE 27

| | |
|---|---|
| BC vs. Benign | BC vs. Other cancer |

| SEQ ID | | p-value | | p-value |
|---|---|---|---|---|
| NO: | Accuracy | (corrected) | Accuracy | (corrected) |
| 4 | 0.77 | 2.49E−20 | 0.55 | 1.00E+00 |
| 7 | 0.84 | 5.86E−28 | 0.61 | 1.57E−01 |
| 9 | 0.64 | 2.80E−05 | 0.56 | 1.00E+00 |
| 11 | 0.69 | 1.03E−12 | 0.56 | 1.00E+00 |
| 14 | 0.60 | 8.55E−06 | 0.48 | 1.00E+00 |
| 16 | 0.75 | 2.69E−16 | 0.58 | 4.89E−01 |
| 17 | 0.64 | 6.32E−06 | 0.61 | 4.41E−01 |
| 19 | 0.60 | 6.64E−05 | 0.55 | 3.37E−01 |
| 20 | 0.56 | 3.84E−02 | 0.60 | 4.26E−01 |
| 24 | 0.61 | 1.05E−08 | 0.48 | 1.00E+00 |
| 27 | 0.80 | 4.30E−27 | 0.62 | 7.44E−02 |
| 28 | 0.60 | 6.52E−03 | 0.59 | 9.95E−02 |
| 29 | 0.69 | 2.23E−13 | 0.59 | 4.16E−01 |
| 36 | 0.58 | 2.17E−02 | 0.54 | 1.00E+00 |
| 40 | 0.61 | 1.73E−04 | 0.54 | 1.00E+00 |
| 42 | 0.75 | 5.03E−15 | 0.63 | 1.65E−01 |
| 43 | 0.73 | 1.93E−13 | 0.54 | 1.00E+00 |
| 46 | 0.82 | 3.46E−30 | 0.54 | 3.63E−01 |
| 48 | 0.73 | 4.18E−11 | 0.69 | 5.18E−02 |
| 50 | 0.63 | 4.27E−10 | 0.47 | 1.00E+00 |
| 51 | 0.73 | 9.83E−20 | 0.55 | 1.00E+00 |
| 52 | 0.69 | 2.04E−05 | 0.48 | 1.00E+00 |
| 57 | 0.67 | 7.94E−14 | 0.49 | 1.00E+00 |
| 65 | 0.73 | 4.18E−16 | 0.58 | 1.00E+00 |
| 68 | 0.70 | 7.48E−10 | 0.67 | 1.98E−01 |
| 71 | 0.61 | 8.85E−06 | 0.53 | 1.00E+00 |
| 73 | 0.68 | 1.01E−10 | 0.57 | 1.00E+00 |
| 75 | 0.69 | 2.35E−06 | 0.60 | 1.00E+00 |
| 77 | 0.69 | 8.14E−12 | 0.50 | 1.00E+00 |
| 83 | 0.64 | 1.47E−04 | 0.65 | 8.17E−02 |
| 86 | 0.63 | 4.12E−03 | 0.48 | 1.00E+00 |
| 88 | 0.60 | 5.10E−08 | 0.58 | 1.00E+00 |
| 89 | 0.54 | 1.10E−04 | 0.56 | 1.00E+00 |
| 91 | 0.55 | 7.72E−05 | 0.40 | 2.15E−01 |
| 92 | 0.66 | 1.26E−03 | 0.55 | 1.00E+00 |
| 93 | 0.62 | 7.19E−08 | 0.61 | 1.00E+00 |
| 96 | 0.69 | 7.22E−11 | 0.57 | 1.00E+00 |
| 98 | 0.68 | 1.08E−04 | 0.60 | 1.00E+00 |
| 101 | 0.72 | 8.66E−08 | 0.71 | 5.95E−01 |
| 102 | 0.66 | 4.41E−07 | 0.55 | 1.00E+00 |
| 105 | 0.67 | 2.49E−07 | 0.59 | 1.00E+00 |
| 107 | 0.58 | 9.74E−05 | 0.59 | 1.28E−01 |
| 108 | 0.62 | 6.51E−06 | 0.44 | 1.00E+00 |
| 111 | 0.68 | 5.59E−14 | 0.54 | 6.62E−01 |
| 113 | 0.85 | 2.66E−31 | 0.75 | 6.54E−01 |
| 116 | 0.65 | 1.52E−08 | 0.46 | 1.00E+00 |
| 117 | 0.86 | 1.32E−37 | 0.54 | 1.00E+00 |

The application's sequence listing, which the Patent Office published only in electronic form, follows.

SEQUENCE LISTING (2297 sequences)

SEQ ID NO: 1 - DNA, 6435 bp, Homo Sapiens
attttctctcctactttctcacagtccctgaacctgtgggatagactgtggtagtaatggtaaatcgatttgcaactagtttcaggtgtacacacacacacacacagcctgtcacactctcccagtcacagccattcgtttttctcagtctttgctgcagtctctcacgcctgctttcgtacacacaattgcaccttcttgtatctttggtctcggtcactggtttggtctcccagccattctctcccgtacaatcaagttcgcacccatacagtcttacagctttagctgacactacagcctcaagtaaacagttttgcacatcatctatttctcaaacgttgagtcgcctacagtgaggtttgtcacctacacaatctttgccacaatccctgacaacctctactgtagtttcatgcccacgtagtctctcacatgtggttttggtcacccagtctgtcttgctcgccatcaaacagtgacagggctgcagtccccgttcccttctcgtagacattattttgtgcataccatcacaggttcttgtacagtaccttgactattcatccaggctcagttattttctgaaacacagccacaatttcccacatagacacaccatcaaaagtctgtggtcacaacttctgcacactctcacacacaatcacagctttccacgtctctgacacacacatggttaccgatatgcagtccctactattgtttctcacacacgccatcacaccgtttctctcacaatcgacctctgcctcacaccctccacacacagtcatgcgtgtcacgctcagctagtcctgacaacatcagagaaaaagtgccagcagcctccagcatcactttgaaaaatatatatttacaggaacaattccccattctctgggactctttagaaaaaaaaaaggtccattttggggaagtaaaacaaacagtggagacgagtgtagcactgtcccccaaatcaccaacccccaggtcccaaggcctgggctgggccagcgctaacaggtgagcccaggagtcttttgaacccactctctcttgcctagaatagagacaggacaggctttatgtcccccattcctccctcccaactccagggacattgaaagggtcctttgtacccgcccgcaggaaattggggggctgggagggagggaactgaaaattcatgtttggtatcaaaaataaacacttggagtgggggaggcggcaggaagattcccccccaaatcccttccttcccacccaccccaccaaatataggaagagatgactccctctcccctattgaaaagccccatttaaaaatagattatactatcaaaatggcagcgggggagagacagggagacctggagtactggctggaggggccccccagacggggaccaccccccaaaaaaaccctccattgggaggaaacaggcaggaccccagggaggttggcagacaaaggaatggcttctcagggggaagaacaaaagggacattcctccctggccaaaaagttggttgaaaaggataagctgtctgagagaaaggttggggaggtggaaatttctattccaagggtgtgattcttccttggccaagactcccaacccattaaatggtacaaattcttcctggacccctgagtatggccaggaataataaaacaaaacaaactaactcttctactcacatccaaaaacgcagacagggctccctcatctccccaagggcaggctgagaaataaagaaagaaaggtcgttctcaagccagacctcgattgtcttgtcttggggaaaaaagtggggaggtgggggagatgtcctaaccaccctaaaaggttaggtcaggctcctcccagtggccttcaaaaaataaataaataaaccgcccctaccattgaagtaggagacgtgtaagggcggccactgggggactgacagaaaacagagaagttgtggaagctgtgtgttttctgtggaggagataatgagagttactcttgggagtaattcttcccaaggatccccaccccaccacaatcagagcatgagtctttcagttgaactatgtttctccttgagatggctggctggagagagcatggatggagtgaccccagaaggggtggtggtggtggtggtagtagtcatggcttctggggccctggggagagcaccacgggggtcgagaggccatccacgctgatagaagggatgtgcacctgggcgctgccactggatggaaactgggggcaaaaagagggagaggtcacagatgggggccattcttgggtctctcaccctgtccaaaacggggaaagaggatcctacctggaaggagagcttggccgggctacggggcgcaatgggactcagggtgctccagaagtgaatgctaggaggcagcgagctgggtgtcagcagcaccggggtctgtggggagagggtggtcggagctcaagtgagtagaaagtagatgtgggatgctggaagggacttggtcccggccccaccacagatttcccactcacactcccagggtcactccccaaagtgcacacacctagatggtaaccatggaggccatgcctatgatctctcaaactctgcagacaccccccactccccactcccgagagcccaccctcagttgctgagacctcattggtcaagaccacccacaagaccctatccaaatgctgctctcaaacctctcaagtcaccatcccaacagctcagggtcaacttccaactcatgtcccacccatgaaaccccatatgcacatcccagaccaaaaagccctgctcaggttccttaagccacaccccaacctagaaacagtcccacagaaagaccctcggtcccacccacaaaagtccccagccctgcccttcactaatcaaaccccatccctccagccagcatcagcccagtcaatcacactcaaaggctccaccctcttcaggaacaaccacactcaccctcctctgattcctgtcagtcacccgccacatgccaatcccattggtgctggcgcccacacaccccacccctccgcaggcactcaccaatgtatgcgtaggaagcagggatggggtcagcgccggccccggagcctggaggccggagccacttcccgatcctggggtccgttcgggtcccggcccacctagcaggctcgggctgagtggaagctctaggtcccggggcttccggcccttctgcggctgggagatctcagggctggaagccgcatggccgcccgcctgccctgcggtgtccataacaaccgcgggcagccgggctggcacgccctcctgtggagggacttctggctcggccttggtggtttctggcacaaaccctctctcccccgcaacttccaactcttccttgggcccttctactttcacttctgggggcaaagcccggcccaaacccggctccacattaagctcttccgatttcaggtttggggcctcgggcggggtcaggatgacctggtagaggagcaggcacaaagagggtgtgtaaggattgttgggaccacaggattctcctgtgggccacccagtgatttccccgggaaggtggcacttggtactcagggcatgactgcacatcagagcaagtcctccaacaggacataggacttcgtcaaggaagtagggcttcctctggggcaggtcctcctatgggacaggggacttggggtgagacaacctgaagcgggtaggaatctgagggataccatcctcattcattaaaacagtggttctcaaaaatttaccttcctctggaccagcaatatctgcctcatttggtaacaagttaaaaatgcaaattattgggcccctccccagccccacaaattcagaaactctgggggtgtgcctggcaatctgtggtttaacaagacctacaggtgattctgatgagcactagagtgcgagaaccagtgcattaaacatattccaggcacctacatgttcggcagctactaactgtagcacagtattctcccctttctgtctcaggatttgtgtagctctctgccccacccctccttctaagaggatgtcttccttccaccattatctcctttaacgggacagctatgtctcttctaccagcctccctcgtcatccggggattacacatccctcctctttactgcctcctcttactgaatttctatattccagtccttacctgcagaggcaagccggcctcttcagcctccagacaggcctccaaggggcttggactggtgctcctgctccccgaggggggcgctgctgcccctgcaggagctgcactggggagcaccacagcaggccgaggatgagggggtggctgcggctgcagagactggatggtgaaggtggaatagaggcccgagcgcatgtactcgttccggctgctgcgtgccaaaccgcctgggcctgccattcctgcacccttgggtgtgcctggctttccagagacagtgtcccctggggcggcatgtatagcagcaggggccacatttggcatggtggaggtaacagacacctctggctggggcgggcagtcctcagtggagcaccctgcgacctcagggtaggacacaaacttgtagacgaacttctggccgctcaccttgcggatgatgttctaggaagggaggagaggaacagagggccttagaggaaaggggcaggctggaggcagggtgtcaggggggaggaggggggtggagtggcatttctcttctcctagtggctttcttcccacttgctcctctccggctttcccgtccctcctctgtaagtttctctctcagcccatttcctctcccattggtttctacctctttcctctcccgccagattccccttatctatatccctccccagttcctcccctttctctcttctctccacaataattttttctttaagccccttcccatccacccctttccaagcctccctttgtcactctccaggtccgtctatctgattttcccactccctccacactgtagctcctcttcacaatggggcccatgaagggcagtaggtgtgggagcaggtcttcttcctggctccaagaaccagaggttcacagggccaggccttgtgggtgactgtcaggacacagttttggagactagcaaatgcaataagacaagaaaatgaagtaactgatataaatgttggaagaaagtaaattaatgtagatggatggggtgatgaattattaatacagaggattatttgaagctaatgatacagaagtggaacagggcaaggtcactgcagaggagagggtgaggaggcctcattattaataccactgtggaggttgaagctaaaatggtaagaaaatgaagtaactaacagcaattagacaagaatattaaaaatactggtataaatattgggagggggcctatatcaaggctggctttgctgggtcacagagcatgtttggggtttttcaggtctggtgggtctcagagatgacctagtgttcccagagggcagagtgagatagcctcattactaatattgttctggagggttgagctcaaggaataaaatatgaaaatggaataaatgccataaactatgaagggtgtgcagcatatgaccagggcagttctgggagtgtggaggcactagggcattctgtggaagtcttagtgctggtcagatatgtcacagggtgggcctgtgtttctcggaagaggaataaaaagggatattcatgaatattgtttgggaaatttcagtagaaggattaagaaaatgaaataactggtataaatattggggggaggagaaacccagcagtggcctgggggtctgagagggcaggatgggggaaattttaaattttagctgtaggaataagataatgaaaacaattgatataaatattggggtagaccagtgctcctctgggaatttaagaagacagtgtgtggaagttggcattaaacatgttgtttcagaggttttagcttaaggaataagagaagaaaataattagttaaaaatgttgggagtcccagaggacgaagtaagcaaaagttggtataatactgtcagggaggttttgattctaggaatatgaaatattctggaataagagaagactatgaaataactagggaagcccagcactggtccaggggtttcagaggacagaatgaggaccagccattattaaccgtgttttcaagatgttggctataggaatacggcaggaaaatgaaacgttgtgcatggcagggcagcatcactttggggatctcagagtgggagtagaaagagtcagtattaataatgcagtggtggttttcgccaaagcagtaagacaagaaagtaggtgagatagtgtttaggggcccaatactggtcttagggtac

SEQ ID NO: 2 - DNA, 2470 bp, Homo Sapiens
gtggaacacatcctccatatagccacactactcaaaattcactgtctttaagtctttactcaaatgcttctccgtgaagccatccctgagccctctttaaaattgcagccccccactcctgtactccttattgtctctcatttttaatttttgttattgtagttagaaccatctgacacatagcttttattccattggttttttgttatgtctttctttacaagaatttgaagtccatcaggccgggagttttgtttgttgtgtttgctgctatctcccagtgcctaaaattgcctggcatacagtaggcatttaataatctttgaatcagtgaaaaccagatggtggcttggcatttccacataggaatgagccaggtggaaatcatccaggatataagtagatcttgaagtgataaggaagggtcatcataatcatgtggggcccattttgccctttcttgtttcttttctctaggctcagcaacagcctcaccaaggactccatgaatatcaaagcccatatccacatgttgctagaggtgagagcagctcaccccactaccagactctgtgtttagggtggtgacctgaagaaggaagagagcgaaagaagggaaggaccatctttccctctaaactggagtcaagggagggaggtcagagcaagcctgggggcgtaacccagacccagtctttgttcaatctcttctgtcctctttttcaggggcttagagaactacaaggcctgcagaatttcccagagaagcctcaccattgacttcttccccccatcctcagacattaaagagcctgaatgcctttgagtcacatggcccttctttttccccataaaccctgctagttgccacgggggcctgttcctagggcacaaagttactgagagacccagagatccagtctctctgtggaacctccaaaatgccccagcagtcctgcctccagcctgttgcctggcagtatttgccagttgaccttatgcactgccctctcttctgtcatcttggcaacctgggccccccacctcaccctttcttccattccttttcctagacgccaccctttgaattgccatagagaatgggccaattcatggtggaggtttgttcattcccacaacaatcaaagggccctaaggtttacgctttcacacacccaatcattccccaggtaccccaaattacacccaaaccctaactcagccctaccttgtcttagcccctgcttgtaagtgttccagcttccaatgggcacagacctggatcccgctctccctagtcgggcccctattctaggttgagtccagccaccgccaatcaatgcagagccaggttcctcccctttttaactctggccgcagttcaaccctgccctctgaaagcatttcgtttctgccactcaatgctctttcgtgtgcctgacagccatcctgccctcctacctccgctgtgttctaaattcgtctttacccagctctatggtcttgtctaaccgtagagctgccctgcccgcctacgcggagcccagtccgacccactcccgccggctgctacgcccatttctatacaagccctgcttccgctgagcagcatggcgtgcgacaccgcccccttggtgttttggcaggggtctagaagtccctcgtccgccaatcagagaaaaacagggccacccacccccgtccttgggggctgtcttccatcaatcccatgtaagccaatcagtgtgaggcagacccccgcccccccgacacaggccccgagccttttcagttgctcacagtccgtcagtccttgagccaatcggcgtggagcaccgtgaaggccgaacgcgcctcctcgggactccaggggccgtgagcgttccatcatttccccttacgccaatcacggcacagctctgtagggaagggcccgtcccccaacccctcgaggccttgcggccgattaatagcgctttggccaatcagcgagcggcgggacattgggctcctcctcctcgggcccacgtgagctgtagggaaacgcaggggcggcttctaggtgctgccgccgccaccgccaccaccacctccaccgccgcctcggaacccaggcctggggggcggtggggccgcgtatggagcccccgccccccggagctgccaacattgccaacgccaccgccacgctacacacaggtgagctctgggcctggagggtggagggcccagtccgtgaccccacgtatccttcccgcccccgcgcagaggatgtggcttggccggtggcctgctggtgttcgactccccgccgccaccaccacggctggtggacctgcgtgtggcattgctcaagcccttcgtcccttatagtggatctgaccgtggcctaacctccccctcccgttgtataatggatcggtctgcgtgcttatgtttttccccacgccaacttagggtggactcgtcc

SEQ ID NO: 3 - DNA, 2408 bp, Homo Sapiens
atctcctgaagtgccagattggagttgactggtgatcaatttaaaggagttacaatccaaagaaatggtgagagcttggcatccaggcctggctcccaggtaattcgcttgggcctgagaggtcactaactgccagttaagatggaatctttttcttttcttttttttcccaatggataacaatgggaagggggctaatcttccagtagctgaaactttgtacccagccctttatcttgagaatgctaatccttggcccgaggatttgttcctgcagtgttggcaccgagatttaagggaagatacctcgttttaaatgccagccacggtctggcttccctctcgacttcagcaccctgtagattgttagtgtctgtggcgggggacgaaaggaacagggctttgcaaggtctgtttgccgactgcgttaccttgggcgaaacttagccccaaaagccacaaatcacctacggtgaagattctccgaagtggaacaaatttccagactcgcattatctcacatccctgcgggatagatggcctccacttaccggctaccgggagagagctgctgtctccgcgtcccactgcttcccggggcgatttccagcgagccgagcctccggctgcacggcaagcgcccgaaagccgggcctgagaggactgcagggctcctgagggtgccaagttccgaaggagtccacgggtgcactggggcctccgaaatctagccgccactggcagtttctttctgctcctctccagctttctcgctcggtctcgcactctctctcctctccctccctctcatccctctctcttccctctgctcctactccgtgtggggagtgacgtgacgtcagcagagattccaccaaactccactgcacagtggcgcgcgggcggccggccgagcccggctgcgcggctggcgatccaggagcgagcacagcgcccgggcgagcgccggggggagcgagcaggggcgacgagaaacgaggcaggggagggaagcagatgccagcgggccgaagagtcgggagccggagccgggagagcgaaaggagaggggacctggcggggcacttaggagccaaccgaggagcaggagcacggactcccactgtggaaaggaggaccagaagggaggatgggatggaagagaagaaaaagcaatctgcgccaacccggcagccctaataaatcaaagggggagcgccagggcagcggggagacagaaacgtacttttggggagcaaatcaggacgggctgggaggaagcgacagggaaagtggcccaagagacggaacaaaggacaatgttcatggggttgtttgggacgaggcgtgtggagtgtgggtgtgagcgtgcgtgtgtgaccttctttcaggcctgcagagttgaggaaagaggtcacagcaaagagggactgcggagggaggaaagtgagagaccggtagagggcgggagtggaggtgggcgcggtggggatgggagaggatgagtgaagagaaatctagaagaatggagtgagctagtgggagagggtgggagggccacagccgggagcgaacgagctaggcttgtcagctggggaaggccgggacgctgggcccagcttagctgggacaccgcgcccgaggtcaaggcgggtggaccaggcatgctgagagtgtcggcgcacaggtgggcacggccacgcactgacccagtgttcacgaagggtttgcactggacaaggctcagacgctcatagagtctagaatttcctctgctgtacctacattcaacaagttcaccctgggtcacggatatctcattttttaaaatgacgaggttaaggttcctggcgaggatggtattaaattgcacgggatagaagtgggggtgggggagagagtttccctcaagtccacatttgctcctgcaaagcaaagagtatgtgaaattacagggcatattctcactcgaaaagtgtgccttacttctgaaccctgattttctgatttcttgacttgagcaaagatgtgtattttggtagtgagcagaatattttggctctgtcctgcctctgagtggaaggactataaatataattcgcctggaggaccaggtgtgaaggcttctgccaggcatatgggacaatgttttttcaatctcaagggcatcctgttaatgtatgtttttggaaagtgccggaacacagccattgctcctggattcggattttcccaccaatattaattcctgcttgagagcaaaactcaggcccgctattaaaaagacatctctttggtccctaattgagaataaagttccctctaaaagttgtattgctcttcctaaatcaatataccaatactcgcaattttagaaatatatagtgactcgggagaatgtgcataaa

SEQ ID NO: 4 - DNA, 2378 bp, Homo Sapiens
atcctgagattttagctgactttttctgttctgtaatcagaggggactgtgatttgggccaatttcttcctcatgggcttcagtggagtcagctgtggaatggaacatcaattcccaccccataggcatgttgtgaggtttcgctaagaaacagccataaaagggccttaagagttatgatgattgttttaaccatttagtagggagggggcatccagcggtgttgctcccacgtaccgatgtcacgtggggcggggaggcggggcggagaacggagagcgtcctctcattctccacccccttcctccaagtccagcgcagggggaggtggctgcgactgactgaggggctagggaaggctggccaggggcgtgggcgtggctggggacggcttgggggtggggctgcgcaggaggctggaggagccccgcgggacccagaggcggggcgtcggcccggggaccactgctcctccggggcgtggctgcaggaggctggaggagccccgcgggacccagaggcggggcgtcggccggggaccgctgctcctccggggcgtggctgctgccgagcatctcccagctcagccgagcccgtgcccaggccacgctttgttccagccgccgcctcctctaccctacggcgtccggagccatccctcgcctgctcgctctctcctttcgcccactccctgcatctgggcctgcatcacctttgccaaccgctcccccgatcctgccgacactcctcccccaaacttctgaccggcacccttgcctggtacccttctctccattcctccccctccatcttctttccccgacccctctcgggtccctcttttcccaaaacccgggtctctccgcgtggccccgcctccaggccggggatgtcccccgcggccccgcgcccatggtcctgacgctgcttctctccgcctacaagctgtgtcgcttcttcgccatgtcgggcccacggcggggcgccgagcggctggcggtgcctgggccagatgggggcggtggcacgggcccatggtgggctgcgggtggcccgggcccgcgaaagtgtcgccgggggcaggcaccgaggtgcaggacgccctggagcgcgcgctgccggagctgcagcaggccttgtccgcgctgaagcaggcgggcggcgcgcgggccgtgggcgccggcctggccgaggtcttccaactggtggaggaggcctggctgctgcggccgtgggccgcgaggtagcccagggtctgtgcgacgccatccgcctcgatggcggcctcgacctgctgttgcggctgctgcaggcgccggagttggagacgcgtgtgcaggccgcgcgcctgctggagcagatcctggtggctgagaaccggtgagcgcgccaggccggggttgggagagcgccgcgtggtgtggacagttaagcgcctgcgttcccgtgtgccttgcgccgtgcctttgcctccctcacctctctgactgcctgcactacatctctgttaggggtcagcctgtctgtttcacagataaggaaactgagccttgggaaagtttagtgacttgctcagtggatcacagtgaactaagatttgctcccagggctagtggggtgaggaatggagttacaggacaggagtccgtccctggctctatggatggagatggcatcctattgccaattctccctctcccccgccccccaagcccacagctctccttcccaccggcttgggttcccgtctatgacaccttctctcgccatcatcccatccctctcccaatgagagaagaagggaaacacaacgctcagaaaagagggagggagacctctcctttccctcctccccaggctgtaaggcgtgctggcctgaggctgcttactcccttcttgccgccccaatccaacttctgctccatccttcattctggttcttgcaacaggccagacatgatctcattctgcagctgctgatgggaaacagttttctgctgggaggcatgggtgggggaagaggacaccggggtgcagagcccggcggggaccaggcagagtgtgtgttctctcccttcaccccacttagcaccaagatgccgcaagagggtcaaacagaggcctggttgccactcttgcatgtctcttgggatctctcctggagtatgaagacctccaaggactcactttccctcccttctgatgccagagcagaccaagctgtcacactccagtctcatgctgaagtctccagcttctcaagcttagaagagtttttggaagagtcactttcagctcatgcagctctcacaagtgtgaagggagtgggttgggggtgttttccttgccattttcgaaaagaaaaaaattacctggtg

SEQ ID NO: 5 - DNA, 2820 bp, Homo Sapiens
cctaggggacaatacccaggcatgttaacggagtttaaaatgccaaggaaattacaccacaattctgcccagtatactacaggctgtcaaaccgaaatgctatgccagctaggagtgcagcaactcccatcctctggccctatttaattaggaagcttcagcagagcgaagcctgccaagcgttcgccgtcagaatctgaaggaacccgagcgagcaagaagagtgcctgacccactccacagaagcctgtccagaaatggaggagtcagcgcccactgaagtcggttccgccctcggctcgcctacatggagcctgaccagcctcagtcatgcccactccggcctgggagacccgcaaagtgttctttttctcaactcccctgtactaccttgaagcttagggaagcaaagagaggggcatatctggactgcaaaaccaatgtcttttgccgcctaggagagaagggaatgagagagagagagagatagatagatagagagagagagagagagagagagagagagagagagagagagagagaaattctattgaaacccagctcctctagaatctgtgtgacctggtcttcaacgggagaccagtgcgacctcatggcacctttgccaggaatcagcgattcccctgcagtcaccatttgatttattgctttctcgctcattctttctcataaagttatttcttcctcatcctagtaagacttttttctttaatgatgacaaagcttctgtttcagtgtttcccctaggattggtgctctttcaaaacagtgaacccagaaaaccatcccgtttaatatttctcaaaatcctcgcagctccaatgtaagcgcaagcatgcaaaggtttcctgctacacctgcactttctgcccatcccagaaccacccctcacccccgggcctgcaacagttccccttgtttctctggatagaggtgggtggtattaggggtctagggcagtaggaggtgaggggctgaggaggccgctagggtaggctggtctgtgctggatacgcgtgttcttctgcggagttaaagggtcggggacgggggttctggacttaccagagcaattccagccggtgggcgtttggcagtcacttaaggaggtagggaaagcagcgagcttcaccgggcgggctacgatgagtagcatgacgggcagcagcagcagccagcaaaagccctcgcaaagtgtccagctgctgcactgccgcggggactcccacagcaccatgactagttcgtgcaactctgcagcagcaaacggcttccgaggaacacaggatcgcgggggccgggcagcgggctactgagcatcccgcggacggcggcagcagaggcggcggcggtggcagtggcacccggcggggaagcagcagccaaacccgcgcatgatctcgagagtttcagcaacatccagggactgggctcagccccggagcgagagggtcgtccgctgagaagctgcgccggagacgcgggaagctgctgccataaggagggagctctgggaagccggaggacaggaggagacgggagtccaggggcagacgagtggagcccgaggaggcagggtggagggagagtcaaggcgccccgcagcccggcagccgcctctcgagctctgccgcccgcatccctctggcgtttgggaagcagcaggtcctcagcccgcccggggtcacgtgggaagaggcagtcgggctctgattggtggagcaggatgcaggtcccgggagggaggggtcgacgaggaggtgcaaggatgcaaggaggaggcggccgcggaagccacagatgggctcgctcgccaggcgctggcccgagtggggctaggcggggatggctcaaatgagaagctcgggcttcagggtgggctacccgcacactcatataccattcgcctcactctccgctccaggacgccccctaccgaaggcggggtccggactagcgcccctcttccgcgcgtgaccccgggccgcgagtgcgggccgcggctgggtggcgtctctccgagctggagatggtgggggcggaggtgtcagaggagcagcagcagcagggcagagaggggcgagtcggcgcgggagagggcgtcctgctggcgaccggcgctccagcgtgcgggagcgcgccgcctaggctgtagggggatgcaggctgggaatgtcgcggcggagaggccagggacgtttctctagggatttacaggaaagagggtgagaggcgatggtgttagaaccgctcttgccgacctggaagcaacagcagcatctcccacaagagcgtgcaaccccaaggctgctcgccgaggcagctcagccatcccggcaggcgctctccttccttctctcttctcccctctctcctcccaggccccccgcagctccgacccagcccaagcgttcgcaggtttgaatccctctcctcatcacccgctcctctccagcccgtagcctattagtgtgtccacctgggaggtgcggtcagatgtgtttggaaggtcagattggtcgggacaagtggtctgagagaaagagaaaggctcctctgcatacgccgcgggtgggttgccgggagcatcggccgggcagcggcgtccgggaaggggagagcgggctccatttgttggcccaggcagtgaccctgcgttccttactcgggtctttgccggatggccggtgacctggggcgacgagagaaggtctaactcggcaggagtctctggctctgcgcgtttctttcattctctccagcgggaagggcaaacggcatagcgggacccgccttccg

SEQ ID NO: 6 - DNA, 2280 bp, Homo Sapiens
accagcacagaattgctaccataggatcgcagcctaagcactagagtgacattaattggtcatgcttaactgcctcaaaatcattttttaaataattacactgatactataatagaaatcatgggtacttattttacattcagatggaaggcattattggatatgtattaaaaaaaagaccccctgaaaaaaataaaataaaataaaacatcaccatcaaaataaaagaacccaaaacaacccctaaaaacttccctcaacaaaatacattgttaactcataaaatggactgatgactagccatgcaaatgtcctaaataaaacctttacatttttttcacagttaacttatgctctgaactgcctaccgatcacaaataatggcgaaatggcactttctgattatactgtattttgtttatagaaagtttgatacgatggaacttatcaggtaagagggtgggtgctgtgaacgagatgccgtctccagtcgcgggggcgggcagagtccctggagcgcgtggattccatgcgagccatgcagcactttttgttttttgtcagaagtcaaagttacttatttacaatacattcatgccttcgtgcaactgcccatccctgcgtagccaacagggagccatcacggggctaatccacaggggaaaaatagatatctatctctctatatagatgtggatatatgtatatatgtatagaaccgcggcatccaaccccacaggccccggggccgagggcgagggcactgtcagttcttccagcagggtcgtgctgggctttctgtcaaaaggggctctcagcaaagagcgagctggctgcgctctcccagctctccacagtctgctctttgtttcaaggagggagctaagtaaggggtcaggccctttcggttgtgcgagctcacagttatttatctacttatgcccatccaggctgatggcgcggggatttgggtacacgcccctccagcccccggggtgcctgcggtggggaaggatgtatcgccttccctctgccctcccctattggggttggggtcttagtctgagagcgagtgagagccacagtcatacactctgtgggccccatctgcgttgtaaggcccattgtgccagtaggaagagtcacagactgtctgtagggaattaatctcggacgcggaggagttggcatctcgtctcttggaccgctttcggttcctcaggataaacacgagcatgcccaccacggtgaaggcggaggtgacaaacaccagcagcagtcccgggaccaacaccgagatggacaccctgctggtgtctaggtaggagttggagtgcgtcccggtctccgccaacccagtgctgtttttactgtgcgaagttaacgtgggcgagatcctagcgtacagctgagggcagatctcgtcattggagaggagcatgaaatcctttctaaagaagttcaccggcgtctcacacttgaggtcgctcatcagcacttcggaacccaagcgttctgcccactgcttgaaaggcacaattgtgcaggagcactcccaggggtttccgtggaggtctatctggatgatggaggttaactggtccagcacccctgccaccgggaggtacatgaagtaattgttgtgcaggctgagtttagagagcgagaccccagcgaacacgtccacaggcagggacctcagcaggttgttgttgagaatgaggatcctcagtttgggcatggcattgaaagtgcccgggaggatgagctggatagcgttgtactccacgttcaggtactctaggttttgcagccccgcgaatttctcccgggacagcgtgtccaggtaattgctatccatgtatagccacctgaggtccaaaaggttcttgaaagtgttgttctctacagtagcgatgttattgttgcccagatccaacagaatgaggttcttgtaatccacaaagtgcgattttcggatgctgtggatcttgttatctcgtaggaaaagctcctgcacgttagagagcttgggcttcaaatcagccaagctgctcacgttcctgttgttgcagttcatctttaaacccgaccctgggatgtggtcgcagctgcagcccccagggcagggtaaactgttagctaagggtttgttcctggagctacccgtcgctatcgctgctgtgggtctgattttgatctgccagttgcctgggatctttgtacctccgtttggagcagaccctggtgtggcatgatcctcttgcccatttgtcttga

SEQ ID NO: 7 - DNA, 5907 bp, Homo Sapiens
gccgtcggagcagggccccagcgcaccgcgagcctctgcttcctccgccttgcagcgccgcgagcccttctttcctccgcgcctggccccgtctgcgcccctctcggcgtgggcattcgcagacccgctaggaggctgacgagaggtgtcctcatagagtcctgccttcttccagacccccaaacgaaaagaaagagaaaagccaacctttcgcctccattctgcacgcatttggagagcggctggtggcgagcgatccgcacaatcgcttccctcgcggcgtccctggacgggcggagagaacccgggtgactgagcctgaggctgagcttccttgggagcgatccatgccagccacttctaccttcaagggggactcgcggccgggtttacgcgcgaaggatgggtgccagggaaactgacttatagacgacccgctccgcgagagactgacaactcagtcctgcgggctttcggggcgcccagaccagtccttagccagaggatctggggctgcacagctcccggaccctggagggggtggtccgggggtgggagactgcgagcatcagcccacgccggccccctcccaccctgcggcggcgaggtgggaagggccaggatgcgagcttagcacctcccctagaaatgcagcacttcgcccccccacctcccctgccctcggcgctccctctttcacgcgctccctcccgcctccttcccaagggcgcccttcttctgcccccagctcacgtctgaatccctcggcgccccctttctcttctcctagccccttcctcacgtcccctgcctccgggtatttcctctctccaatcccccacccccgcaccgcctgattccgaggggcgggagcgcattgggctgcgcacgggtgggggcgccgcgccagcttcgcgtagctgctctgacgccgctgccgccgccgccgccgccgccgccctccgcagcccagctcgcgccccgcggcagctccgcagtgcactagccaccaccgccgccgccgccgctccgccagacctgctgccagcttgcccggtccagccctgagagagcctcgaacgccagctgcgagggtcatgagccagagagccccggggcgccgcgcggagagcaagcggagatagcgactttgcgccccccagccctcgccttcttgcatcgcgttccccgcatcctcgggtccttctgtcctttccgctgtccccaccgccgccatggccaccttgctccgcagcaagctgtccaacgtggccacgtccgtgtccaacaagtcccaggccaagatgagcggcatgttcgccaggatgggttttcaggcggccacggatgaggaggcggtgggcttcgcgcattgcgacgacctcgactttgagcaccgccagggcctgcagatggacatcctgaaagccgagggagagccctgcggggacgagggcgctgaagcgcccgtcgagggagacatccattatcagcgaggcagcggagctcctctgccgccctccggctccaaggaccaggtgggaggtggtggcgaattcgggggccacgacaagcccaaaatcacggcgtgggaggcaggctggaacgtgaccaacgccatccaggtaagcgcgggattcccagttctgcctgtcctcccccctcccagctcagcgtgccgggctctgcccccgacagtcgcccggtgatctcggcctggagaccccctcctgtacccaggaatctccctttctccatccctcccagccctgcgcggggacctacgcccccaggcggtgttttccgccctaacccacgctccctcccaacggcaccagctgcaagaccgctaggctgaagttcggtctgagacacctgtccggagacactgcaaaagtgaaggaaatggggggagggagcaggaagcgatgagaaagaaagaaaatcaggattggagggcacggtttggtcttggactctggaacggattcacagctgcatttttgggaggaaagaagaaggggaaatcgctgaggtcggagtctcctccccccgcacacacgcatagacacgcacacgtatataggcaggcacaccacatgcccacagccccccttcccacgaacaaaggcgcaggcacaggcgcacacgacatgtatctatatatagaccacagtactatccccaaatgcacctgcgtacacccctacagctccacaaacaaaagcatatacctgcacataccaaacacacgaatattcgtttgaacatatgcacacacacatgcacagatgcatgcagacaggaaccagcctgctcccttgggtgcggccctgttggagacatacaggtatacacacacgaaagcacacacatgctcccacacaaacacatttagtccgcaataatccagcattacctgtgcacagactcgcccctctcgcccgaaatcccggctgcaccgcaaagaggcggccagctcctccccgtgtgaccctggcgaagccctctccagaggctaagaatggcccctgctctctaggccctctccccttattcctaaccccccactccccaccaggcggcgcaggactcctacatagggagcaggtttggagtcttggcaacgacctccgagctagcaggggctggcaggccgcagctttctgggccgaaggagacttcagctctaggcaaccccggtcccttacagcttggccccgcggcgtccctggagcgcactatcactggggccacggaaggcaggttttctgggagcagaggcctcccaggggttgttccatgtatcggggtaagcaggactccaccgggccccgaacaccagatggcccgacccaaggcgctttccgctccggggcccggcgagacggccttgctggatcacggacccggggctgctcccgccttcgctgtgccccgcgacttcccggggcgtctttcaaggctccgtttgataggccccaagggaggccagggcaggaggctggaggctcgtaggcctccgggaccctggatttcgttagctcttagtccccgtgtggattctaaaccctacagccctgtccgcctgaccctgaagcttctggttctagactcttgctcggttcggctttctggcctccctggcgccttcccgccaagctcctcctcctgcttgcctccccagcctccacttagtccccttccttaggtctcgccctcgcctcactctaactccagccttgtcctaagactctcaatttccagccctgcttcctcctccccgcgcgctgctccccaagcgtcttcacattgtctctgttcttgcctcccaggggctttgccccaccttcagcccctctccctctctaccctatttccttttcgcctcacaactgcagcctttaacgtttcctcctctggtctgagcctgagacgcccgagttttcctctttagctcccgtgccccattccagccccaccacaaatcccgtgcccactctttccactggcccaggcccagctcactacctttcttagagcccctttccgactacgctcccttctgtcccttctcatctcctcccccaactcctcattctgttcctgtccccagaaaccatcccgaagtatctcccttccctcctgtggcttctccctattctcagccctctcccaccctagccctctcgctatcaccagccattagcgcacctttccttctcagatccgtccatacatccctccctctccatctctggctcgacacccgggctcactattagttcccctacatccaccccgcagcctgctcttaacctctcctccccggcggctcagacccaattctcagtgtccttagcgcccccttcgggccacagcgttaagccacgccccccgggcccctcatccgttgccaagttcgctgagcgtccgcgtctggttgcctctccgccccacagggcatgttcgtgctgggcctaccctacgccatcctgcacggcggctacctggggttgtttctcatcatcttcgccgccgttgtgtgctgctacaccggcaagatcctcatcgcgtgcctgtacgaggagaatgaagacggcgaggtggtgcgcgtgcgggactcgtacgtggccatagccaacgcctgctgcgccccgcgcttcccaacgctgggcggccgagtggtgaacgtagcgcagatcatcgagctggtgatgacgtgcatcctgtacgtggtggtgagtggcaacctcatgtacaacagcttcccggggctgcccgtgtcgcagaagtcctggtccattatcgccacggccgtgctgctgccttgcgccttccttaagaacctcaaggccgtgtccaagttcagtctgctgtgcactctggcccacttcgtcatcaatatcctggtcatagcctactgtctatcgcgggcgcgcgactgggcctgggagaaggtcaagttctacatcgacgtcaagaagttccccatctccattggcatcatcgtgttcagctacacgtctcagatcttcctgccttcgctggagggcaatatgcagcagcccagcgagttccactgcatgatgaactggacgcacatcgcagcctgcgtgctcaagggcctcttcgcgctcgtcgcctacctcacctgggccgacgagaccaaggaggtcatcacggataacctgcccggctccatccgcgccgtggtcaacatctttctggtggccaaggcgctgttgtcctatcctctgccattctttgccgctgtcgaggtgctggagaagtcgctcttccaggaaggcagccgcgcctttttcccggcctgctacagcggcgacgggcgcctgaagtcctgggggctgacgctgcgctgcgcgctcgtcgtcttcacgctgctcatggccatttatgtgccgcacttcgcgctgctcatgggcctcaccggcagcctcacgggcgccggcctctgtttcttgctgcccagcctctttcacctgcgcctgctctggcgcaagctgctgtggcaccaagtcttcttcgacgtcgccatcttcgtcatcggcggcatctgcagcgtgtccggcttcgtgcactccctcgagggcctcatcgaagcctaccgaaccaacgcggaggactagggcgcaagggcgagcccccgccgcgcttctgcgctctctcccttctcccctcaccccgcccccaccagcccagtgcgccctgccgccgcgttgggaggccaagctttaaacatctctggttcctagtttctgattattcggggatgggggggatgggaggggacagggattcacgatccatcgcgtctgcgtttctgttgtcctttcttttccacaacaccctggttttggggggaggcggggtgcatttgcgggcagggttctctgtccttccaagtggggccccgacactttggttccagtcatcgagggggttgggaagggagggagagggggcgcagctcgcaggcgtggcaacttgaccttgggggaatatttcacatccatccagagctcggaatctacagcgtccagccatttccagcaagagcgcttcccattccggagacgtttcaaccctgcagcgggaaaggctgactgggaaatccattttgggtgggcaatttccttcaacgaagccggaaggcgagaagccgcggcggggccagcttgcctgccggttttcaggaatctaaactctcatcttgtgcaatttatcaggtgtggaactgttctactgtgcgtgtggtgtgctcgtggtgaataagatgaaatgtatatcagaaaaaaatctatctctaatttagagtgcggtacataattatatccgcaaataaagaagagacaaaggcttgcgcggcccggtgtcgggtttgtg

SEQ ID NO: 8 - DNA, 2315 bp, Homo Sapiens
ctgtacctggcgtgaggtctcctggccacggacgttgttggcgtcacacctgtggcacctgaggtgaattgttcagatggaaacggcaccatcaggcaactggcaacagaagcctaaagccctgggtgcctcaggtcagaggaaggaaggaatgcaagggccccgctccccccaatgccaggagcgtgtgttcacagctttagacaggacaacccactgcaaatccaaagcagaaaacatggtccaactccatctctgtggcaccttcatagatggtgcccacctgccttggcagtgatgaccgacactgcgaacgctgtgctggcagtgtgtttaagggctttaactgaatcatctcgatggagctgaaatccagccccattttacagaagagaaaactgaggcttagagagatcaggtgtcaagttctatgccaagcacagggaagcaaaaacaggacacactcaacataaggtggccccaggaatcagtggccaggacacgggaggtgtgctgagcgcagatgggcagatgcaagctgaggtggcctgttggagggtcctggaccttccagaaaagaggacatcagctgctcagggagggaaggtttgagatggattctggctggtgtggatcagcccatggtgtgtttgcaggcagggacaccttgaacagacatgggctgaggggagtttgtgtggagcgtggccagtgaaggctgggctggccggcagggtccgctggtcatgggaggcctggcctgcagcagcagggcccatcaaagacatggggatggatggctgatggacaagatggctgatggacagcgttttagaaggtcgcaggcttgtttaggctgaggccagggagggttagggtcctcagggaaggagagtaagctaggggagcctcctgcatagaagacttcctacctgaggccgtcccctaggagttcagccaccccgtggagagcctggcgctgactgtggaagaggtgatggacgtgcgccgtgtgctggtgaaggccgagatggaaaagtttttgcagaacaaggagctcttcagcagtctgaagaaggggaaggtgaggctgcctagacgtggggctacgctcttgcccgctgggtcaggggcgggtgccgagagggccagttcccaggactgtttgctcatgatctggttgggagccctgagggggtagcagggacagggcgggaccccagggagctttggacaaagcggggctctaaccagtctctcctgacagatttgctgctgctgccgggccaagttcccgctgttctcgtggccgcccagctgtctcttctgcaagaggtgagccttccctttagctgtcagttcacaagggaaggaggaggcgagaaacctcggggcagtaccgcccacagaacttcctgtgattccaggaatgttctagcatgttcgatggctgatgagtccacaagatatggttagtacgaatgaggagttaaattttaaattgtatttaaattaaattaaatttaaatagctaagcaactcccagtttcagccaagatggggtaataggcatcttccacagccaagaacaaacaggatgtgaaacaatggttttcaagacagcaggcaacaaaaaggaaacacaacggggcaagcctgccatcaccacagtcattgcctggagagtttctaggtcatgagccacagctgccggactccccagatggaggaggtcaggctgagaatccagggagaccacagcagctcgagtccgccgtgtagaactccagaggagagggctgcgccgagaaagcctcagagaaggtccccctctctgaaggaaatgactgaaggctgcagaacatttatcctaaagcagagattggcagactatagccacgggccaaatctggtcctcggcctgttttgcaagtaaaatctcactggacacagccacacccatttattactcgctcagccacgcctaaaaggtttattctctggccctttacacaaaaaatttaccttcccttgttctaaagatctgaagggacggtgctcaggggcaggaatgagtaacatcggtttccaccggccacaggcagaaatgtcataattcacagggcactaactggaatgcacacaaaggactcgcctcactaacgtggagtaagtagcccaaagtgattgttgctctaggcctgactgatacatcataaaagcaagacctgaaaggatcaaactgttcacaagtatcttaactgattctgagaacaaagctcaagaataagaattttttaaacatcaacaaaaaa

SEQ ID NO: 9 - DNA, 2696 bp, Homo Sapiens
aagtccatgcagatttacttttagtagttcacatgacaaataaatactgcgtttgatttccaaacattaaaccatagtatattatagatagatatagagttatcattcaaagtatgatatttcaatctcaaaaggcttcccctgaagaatattacaaactcttcctctctttaagatctgctgggtaggaaagatgggagaaaatgaattaatgtttacacagaaaggaggataatgggggcaaaaataatagatgaacgtatgggtggatgagagaatggataaaatgataggtggatatgttgatcttggacagatgggaaatgagtggatatatcaataaacagatatgtgggtggatgggtggagaagaggatggtggatggttgtggttttatgaagagatgtgaaaaaggaagtgtggaatgatggatgagaagttgtatgggaagatgaatagaagaataggtggttgaataaattaaaaggtgtgtggttggatgaatgaatgagtgggatgatagatggacctaagtggttagtggatggacaggaggatggatggatgtgagagccccagaaggacataaggaaagatgggtggatagatggatgggcggatggaaggatatttaggaggatgaatgagcatgtgtgtggagagaggtgcccattcacactggcttgaacacatgggttagctgagccaaatgccagccctatgacaggccatcagtagctttccctgagctgttctgccaagaagctaaaattcattcaagccatgtggacttgttattgaggggaaaaagaatgagctctccctctttccacttggaagattcaccaactccccacccctcactccccactgtgggcacggaggcactgcgccacccagggcaagacctcgccctctctccagctcctctcccaggatatccaacatcctgtgaaacccagagatcttgctccagccggattcagagaaatttagcgggaaaggagaggccaaaggctgaacccaatggtgcaaggttttacggttcggtcatcctctgtcctgacgccgcggggccagcgggagaagaaagccagtgcgtctctgggcgcaggggccagtggggctcggaggcacaggcaccccgcgacactccaggttccccgacccacgtccctggcagccccgattatttacagcctcagcagagcacggggcgggggcagaggggcccgcccgggagggctgctacttcttaaaacctctgcgggctgcttagtcacagccccccttgcttgggtgtgtccttcgctcgctccctccctccgtcttaggtcactgttttcaacctcgaataaaaactgcagccaacttccgaggcagcctcattgcccagcggaccccagcctctgccaggttcggtccgccatcctcgtcccgtcctccgccggcccctgccccgcgcccagggatcctccagctcctttcgcccgcgccctccgttcgctccggacaccatggacaagttttggtggcacgcagcctggggactctgcctcgtgccgctgagcctggcgcagatcggtgagtgcccgccgcagcctgggcagcaagatgggtgcggggtgctcagcgcggacccggcggcagcccctccggctgagtcggccctgggggactggagtcaagtgagctgtctgcgaagtgcattgggctccggaaagcagggctgggatttgcgctaaaccgttggagaatgtgtctgtggaagcaccatttggttgaaagaaaaagagaaagagaagaaagtttgttgggcaggctgccggcgcgcagttttgggcgaggtcgctagagctgcagcacatggcagaaagtaaccgttctcccggatgcgcacagtcgttgtctggactaacaggctcctgtgcccaagggctcgccaagccccaccgggctgtgtctaggcagggcagagctgggcggggcagagactggggctggaacagggcgagtggctgttatcaaggtggtcacagaagggatcacaattccaagtgtgagactagctggcaatgggttttccagaaaggggtcctgggttctcccagctccccactgagccttgttccaaagcttacagtccgcagtgtcactgccaccttagcgctgtggaagcttgaaccagctctgcggtgaggtcttgggtctccatgagattccagcctgggatagggagcatgaatatgagaggcaaccactggaccagctgcttggtcctcaccacctcctgcttctgccaatcagtgtggggaaatctcaacagtaaggtggcttatattccctgcctggcagcctcagagcagagagaagagccttgataccagggcaacatcagggaccctggagctagggctccaatatctcatccaaacagggtcagtgctttgtggtggctatggaggggaggggctgcgtgtaaggtatattctagcacggctcaactccaagcattctctttctttgtctatgtatgtacagataattacatggccgatttgcttatcgctggccaaaattaatctttcttttaagaagtgccagctgggtcattaagacagctcagcctgcatgcagtaaattctactcagcaaatatttattaacccagttccacgggagtactgagaaattga

SEQ ID NO: 10 - DNA, 2251 bp, Homo Sapiens
ggaccccgagccgcccccaggtagccaggagcggcctcagcggcagccgcaaactccagtagccgcccgtgctgcccgtggctggggcggagggcagccagagctggggaccaaggctccgcgccacctgcgcgcacagcctcacacctgaacgctgtcctcccgcagacgagaccggcgggcactgcaaagctgggactcgtctttgaaggaaaaaaaatagcgagtaagaaatccagcaccattcttcactgacccatcccgctgcacctcttgtttcccaagtttttgaaagctggcaactctgacctcggtgtccaaaaatcgacagccactgagaccggctttgagaagccgaagatttggcagtttccagactgagcaggacaaggtgaaagcaggttggaggcgggtccaggacatctgagggctgaccctgggggctcgtgaggctgccaccgctgctgccgctacaggtgagatggcgttgggctgacgttggggtcaacgggtagagaacgcagggatgcggccctcgccgaagagagccaagaagggaagagcgcgctctccaaattgcttttgtaacttgttttcagtgagcattttattgattcagaatctatcgagaatagcactagcgagctacttttcccttgagatgggtcttattcatcttggcaatggagtgagttggattgtggggaggaagaggaatgggaaaatcagtttataaatattaatgtcagcaagagtgtgctgttggcaggacgtatcgcgagcctggagattttggtggccgcagttggtaagtggctacaatccagaaagtaggatcgagttgctccccttgtcttatcagtgtatcgtttctcgggcgcgggtctaacaccttacaagtggtaatttccgctcacggcagctttgtctctcttctaccatccccagacccagccttgcactccaaggctgcgcaccgccagccactatcatgtccactcccggggtcaattcgtccgcctccttgagccccgaccggctgaacagcccagtgaccatcccggcggtgatgttcatcttcggggtggtgggcaacctggtggccatcgtggtgctgtgcaagtcgcgcaaggagcagaaggagacgaccttctacacgctggtatgtgggctggctgtcaccgacctgttgggcactttgttggtgagcccggtgaccatcgccacgtacatgaagggccaatggcccgggggccagccgctgtgcgagtacagcaccttcattctgctcttcttcagcctgtccggcctcagcatcatctgcgccatgagtgtcgagcgctacctggccatcaaccatgcctatttctacagccactacgtggacaagcgattggcgggcctcacgctctttgcagtctatgcgtccaacgtgctcttttgcgcgctgcccaacatgggtctcggtagctcgcggctgcagtacccagacacctggtgcttcatcgactggaccaccaacgtgacggcgcacgccgcctactcctacatgtacgcgggcttcagctccttcctcattctcgccaccgtcctctgcaacgtgcttgtgtgcggcgcgctgctccgcatgcaccgccagttcatgcgccgcacctcgctgggcaccgagcagcaccacgcggccgcggccgcctcggttgcctcccggggccaccccgctgcctccccagccttgccgcgcctcagcgactttcggcgccgccggagcttccgccgcatcgcgggcgccgagatccagatggtcatcttactcattgccacctccctggtggtgctcatctgctccatcccgctcgtggtgagtgaccggggctggggccctactcggcctttttctcgcatccacctcccgcgtccattccccgctccctgctttccctctgagtccttggcagtgaacgtgtcgcctttaggtcggggctgggattcccacactgtttctcagagcaggcccaaccctctttgaagtcccaaccctaacgagatttagcaggtgctttgcccctacatcccccagtttatgttcccggaagcctgggtttctttctccaccgagacagcccttaccccttgctgcctgacactggccgagtcttccaagaaaaccccccgccccctctgttagacgtggaggggagcctgctgtagtgtgacttagcccattcctccgtactgtgaactgtgaactgca

SEQ ID NO: 11 - DNA, 2586 bp, Homo Sapiens
cccgcgcgggcgcgggagtagccccgctgggcgctcgcagccgcgggagtcaagccccctccccaggtgcaggcataaaagtttatggctcttgaacaatgcggggcagaggtttttccaagcaacgtctaattggccgcttctaattaaggaaagagaggcttccagctctatggcaacccaagcagggcagcttcaggctaaaggtactttagaataataagatcattctaagaaatggaatgtctcactggacacccgaacaggttctctgtcattggaattggtgtgtactgtacttcaaccagtactcttgtgtggagggaggcgacccagtctaggaaagtcaactacagaaagaggtgacctccgaaaggattgtcttagcgctattagaatacatgtgaccacaccaaaagcccaggcggacacccgcagccagctcggatttggacaattcaacattgctggcagaactgaagggaacaagttaccccaaccccatcccctgtacgcgtagtgctgagtgagttgggggtgggaggacagcggttcgtttattgcccccttttaaaatctgagatctgaaaatatggaggtcccattcgttttcccagctcttgattgccaacaaaaaaacaaatcccgctggctacattttctcctcattccaaaatagcaaccctatggcttgtattaagcccttcagaagtttatctcatttgctctgggccagggagggaacaatgctaggaaaagtcaccggtgctcttccatcctcgccccttccagggtgcaggatgtgcgggccggcgggcctgtgatcccggaacgcttcctgccatccccttgcgcgaacttgaaaggactgggaggtgttgagagcagagttcagggctggtgcactctgcggtgctgagtgggcggcgcgcccgggcgctcaggccgggggacctgtagtcgccctaccgcggaggggaaaatacgtagctggagggcgtgcgccgtgcgggttgtgatccgttaccccatcggtcatcctggggtctccccaagcctctaggtagggctgtgagagtcccctagagctgaagccccggaggctgacctgtgggtctggctgctatgggaacccggttggtccaaagaagcctttcttccgggcacctggaattccagtttagtgtggggcatcggggaagtggcgctggggggctgggttgggggacctcagccggcagctccggagagggcctacccttggggtcgctgggtgaggccggcacgattcttggctccaaaaggaaagtttctgcttcttgttctggcgcgagaagccaaagacttattttgagagcggagagagaaatgttattggtaacgttttctttggaaagttcgagaggggtcttctggacacactacctagtgcccccaaaccagagaagtagtttttctttggtgcctgggctcagaagtcgccactcactcagcccatggttcgaaatcagcatgggaagcgccggggcaaggcttcgtcggagactagaggcctgcctgtcgggaggagcccctgggggatggggaccccattctcctgcttgctctggttcccacctgggacgcctccgtaggagcccagaaagacgatccactacatggtcccgggacagagcagcgcgcccaactttgagggaactttgtgcgcctctctgaggccctagctttccaaggcaccgccgtccgttcttctttccctagaccgaaactggggaagagtgtgggcgcttctttgccccgatgagttcgcctccccaaacgcctacttcggctgcaccagagcatctgggaaactctgaaaggtgcccaggcctcacacagcagcgtctccctactcagcctctgtctttgggttttttcaagagagtctctacctcatgcctcggtctttcttcgatgtcgggtccccgaggtaggcacggagtccctctgaaagcagttgcctatctgtgcccctttggtgtaaagttagagtttactttgttgggggaaggggaggtagaaaagatcacagttgggaaagtgcgcttttcgccttgttcctaaaacatgcctcaagactgtcatcgcgattgttaggagagctatcaacgtctaggggctataaaggaatttctgaaccctcggcccttcccaaacccccaggttcctaaaaccctagtgggggtctcttggggctgggattcaggctggcaccgctgggaggacctcgcctagcatccctttattaatatttcacgaaggcaggctcctgccttctctggagcctcttttctcggaatgttcccaaactctggctaactcactcccctgtgagccatcctagggctctgtggcccgggaagagacgcgtcaactccgcgggtctgcgcgcagtccttagccgcaaagtgctgcaagtgacccccctgacggccctttccgaccgaagagctcgggaaccaaagagaaaaaaaataactttattttcaaaagaacaagtcatcactgcggcgatactgtggcggaggactttggcgatggggt

SEQ ID NO: 12 - DNA, 2553 bp, Homo Sapiens
ctggccacccctgccctcccttagacctccagagcccccagtgtagccacagaggatgctgttggcttcagccccaagaagacgccgcttcctccagagggctaagtaagtgggaatccccctccctacttgtcctgggctccaggcagggcccctggtgtaaggcctggggctggaagccgacccacctaggtccaggctctggggcagaactgaaactccttggttactgtcggctgcagcctgggagcaggccactgccaaagctgtgggtccttccaggacagtctccccatgaggccggtcctccacctgctgtttcttcacacctggtggccagggatgtggccctgggtagaacgatgattctccactcctgtcattatggaagccaccgctgtctcccagcccagccagccacctgggctgcagagcacccctttcatgccctccgggtgcctcccccttctcctgccccagcctggctttgtcctaccctgctctcagggaggggtaccctggagtggggccagggcatggctctcccccgagggagttcctctctggctgtccccagggcagctctgcacagcctcagtacctggcgcacctcccttgacatccttcttagggacagtcaggcactctgtgtggggcactcaagagagccaggcccgtcagcctctagctcctgccagaatgcaggcctgaggggtgaggggcggggcaggggcagggacaggaactccggcgtgctctccatccgcaaaggttcactgaggccccgagccccagccactgagccaccaagtcagcctgggccaggcctgggtgccctgtctgcaatggaggcagagacggggtctcggggcagttctgaggatgctgggtgcacagcgggggcctcgccggcaggaatcacttatgctctctcctgggccaagctttgtggatgcccagcctggggccgcggggagctggcaggtcagtggcagacactggtgggcagacctagtgtctggtagaacaggcatcaaggaagtggtgaccggagggaagccaagtgcactcaaaccctcgggtgagtcatcaccgccgggtctttcacagctgctgaaagtgagcaacagtgatgaaggtttgtgagtttctgcgtgagcgagtgaatggaccagtagcagtttccaggttgtggaagagcgttccctccccgggatggggacacttggttacagcaattcctaatcccccacccacccaccgcccactgcagaggtatgcgggggccctgcttcctgcaggcaggagtgaggggcactcctgtgatgtggcacccctgtgaccgaggtcatgtgtgatcggtgtaagggcaggaagcgagtcattggtctgcaccaggcgtgggggcttctgcgagggcaggacccaaagtcggcctggcctcccggctgcagcactcctttccctttcgaattaggttagagccctgggacgggaggtgccctgtagaccacccccctcaccaacttccgtcctccgccccacccccgcggtgatccggtgaactgccggccccctgctgtgcaccgagtggggcagtgaccctgacgtggcgtctcctgccgcccctgccaccgccaccacctccggtggcccagcctccgcattccccacccccatggaggaatgcaccaggcctcccttcctggatgcacccctcacccacatgcttccaaaccctggcattttctgctccccctttactcccaccccttcccctaggctcccagacaaaggggaagtggctggatcctcttaaagggacagtgtcccaccagcttactgctgaactcccctcctcaaccccagttccctagttacagttaattagcattagcagacagcccatgagtgatacccatgcaggccccaggctgtggagagtttcctgggtaggaaacagcccttaaggtccctcatctcatccaggtcccagtctttcctacctgcctctctcctagattgtggccctttggagcctggttcttctgtccctgtgtgaccgacacatagcacccaaacagtggcagagcgggacggaccccctagcctgttctctgtgtgggtctgtaccctgacccagacatgcccccccacagcaggacccaggggggcacatgtgtgcctgcgggttcactggggcacccgcatttggtttattttattttttagagagagggtcttgctgtgtcacccagctggagtgcagtggtgtaatcatagcacactgcagccttcaactcctgggctcaagcgatcctccctccccagcctccctagtagctgggagtacaggacccactgtatcctggctaattttttaataattttttaagagatggggtcttactgtgttgcccaggctggcctcaaacctctggcctcaagtgatcctcccaccttcgcctcctgaagtgctgagattacaggcatgagccaccatgcccatcccagactgacatttctatatttgttcatcctggctgggcaggg

SEQ ID NO: 13 - DNA, 2365 bp, Homo Sapiens
gtggtcgtggtgggggtgttagctgcaggggtgccctcggtgggtgggagttggtggcctctcgctggtgccatgggactcgcatgttcgccctgcgcccctcggctcttgagcccacaggccgggatcctgcctgccagccgcgtgcgctgccgtttaacccttgcaggcgcagagcgcgcggcggcggtgacagagaactttgtttggctgcccaaatacagcctcctgcagaaggaccctgcgcccggggaaggggaggaatctcttcccctctgggcgcccgccctcctcgccatggcccggcctccacatccgcccacatctggccgcagcggggcgcccggggggaggggctgaggccgcgtctctcgccgtcccctgggcgcgggccaggcggggaggaggggggcgctccggtcgtgtgcccaggactgtcccccagcggccactcgggccccagccccccaggcctggccttgacaggcgggcggagcagccagtgcgagacagggaggccggtgcgggtgcgggaacctgatccgcccgggaggcgggggcggggcgggggcgcagcgcgcggggaggggccggcgcccgccttcctcccccattcattcagctgagccagggggcctaggggctcctccggcggctagctctgcactgcaggagcgcgggcgcggcgccccagccagcgcgcagggcccgggccccgccgggggcgcttcctcgccgctgccctccgcgcgacccgctgcccaccagccatcatgtcggaccccgcggtcaacgcgcagctggatgggatcatttcggacttcgaaggtgggtgctgggctggctgctgcggccgcggacgtgctggagaggaccctgcgggtgggcctggcgcgggacgggggtgcgctgaggggagacgggagtgcgctgaggggagacgggacccctaatccaggcgccctcccgctgagagcgccgcgcgcccccggccccgtgcccgcgccgcctacgtgggggaccctgttaggggcacccgcgtagaccctgcgcgccctcacaggaccctgtgctcgttctgcgcactgccgcctgggtttccttccttttattgttgtttgtgtttgccaagcgacagcgacctcctcgagggctcgcgaggctgcctcggaactctccaggacgcacagtttcactctgggaaatccatcggtcccctccctttggctctccccggcggctctcgggccccgcttggacccggcaacgggatagggaggtcgttcctcacctccgactgagtggacagccgcgtcctgctcgggtggacagccctcccctcccccacgccagtttcggggccgccaagttgtgcagcccgtgggccgggagcaccgaacggacacagcccaggtcgtggcagggtctagagtgggatgtcccatggcccccatccaggcctggggatatcctcatccgcctcccagaatcgggccgtgggggacagaaggggcctgcgtgcgggcagggagagtattttggctctctcctgtcttcggggtttacaaagtgtgttgggacttgcggggctgctctgtccaagcctgggtctggcgtccgcgtctctgagcctgtgagtgcgtgcgctttcctgcgtcctcttgactgccggtgctggggctctgcgtcctgcgtccgcgggagtaaatacagcaggcgaaggggaagctcacacaatggtctccagcgctctggggcagggcttctgaggggcgggcctgcctctgccgggacctggagcccccgcccctcggagaggctcctaggctgacttgggcagagccctctggtgggccgggagggggaaaggctgtgttgaaatgagcaaactgtccaggtgtcaggccaagctgggaggtgaccagcctgaggtcctccccgctccatggccagaaccagggctgacatctgggtgtcctgagcccagctgcccacacggcccacctggggtcagccctatctgagtgggggaggcggggcctcctgggggaccagaactttggctggacgccaagcagagtgccagtggctgttcttcagggctgggcctgaggagggtgtggggcggcgaagggacgggagggggttgtgatccagtggccactggcgctgtgcagagtgtgagctggaaacatcgtagttactttgtcagcttagtggtgaaagccctttttcaggctctatccctttgcatccctgcttcccagagggaggggaggtctgggtctgcagagctgggagggcttgctgttcccgcccccctcccccacaacacctcctcatctggacatctttgggcacatgc

SEQ ID NO: 14 - DNA, 2367 bp, Homo Sapiens
gacgtgtgcggcggtaagcgcccggcccgtaccccctccgcaccccgcaactccgactttggcggcccccagacccggcgaaaccgtgaagtctcggcctcaggagccccccagatccatggtctcagattcgaaccctcagacctgttcgatctccttttatgccgtcccggggacccttctccaccctctgtctcatgatccaaaatacaggcccataggtttcagagataccctgtgaattcttccttggggtgtcctgaaccgcgatcgtagatctgtgcccccagttccagcggggaaccccattgtccgggaacccagagctcacagccacgatcttagacccgagcccacagagccagaggtgacactggaatcctgccgctgggaatacctaaattctcaagcccacatttgggatttcctaaaccccgccctggggccctttaggccgtggatgtttgctccgcgcccatgacctgccaaggacctctacattcaggctgggctctggatctcacattctagcgcccagacatgtcgggaacgccttacgccaacttggggtccccaccaagagaacccccaccagatctgcaccctccccttcacgcgtgcacccagtccaggctccctcaagccccacgggtgccttttagacctgaggaggttgcaaacctgatcccccatacctgccccacccatccgcggacaacccgccctcgcaaactcagacccccacccggaggcttcagattcctcccaggtccagctgccggaaatgcgtgtttgaagggagggtgtgggctcaggggcgaagcacccactggtccccttttttccccccagcagtgagtcgcagccatgttcctggttaactcgttcttgaagggcggcggcggcggcggcgggggaggcgggggcctgggtgggggcctgggaaatgtgcttggaggcctgatcagcggggccgggggcggcggcggcggcggcggcggcggcggcggtggtggaggcggcggtggcggtggaacggccatgcgcatcctaggcggagtcatcagcgccatcaggtaaggcggagactatcagaggggcggggcctgggaatgggaggagcctcagtgaggcgtggtctgggaggggcgtggtctaaaaatagaataggattaacctggaggctaacctgggtacatgaattaggccggggaggcctggtttgagagttctgctgtaagggggtggaccccagtgaggcggatatcagtcattgggggcggtgcttgatatgggagtagtctgattgtgtgggaccaggacaatgtggtcctgaggggactgatgtggagttttggcgggtggggcttatgggtctgggctcagcctgcattggctaacctggagatgaacgttaaaggtgcggagccaatgcgtctgagtgacattttacggaaggggcttgacttatgagtgtggtcagaggttttaggtgggttaatgaggaggtgagcccaggaggaagcaagacctaatggggtagggtaaatggcccagaatgggctgggcttgctgggaactggctggattaatggagaaaaatgccctggtagggatagggcaggttggcttaattagccacggccacttagcagtgatcccttgaaggggcggggaccaatggctggggtaggatgttgggaagacgggcatttaggaagcgggccatggagtagggtcttgggcagatggcacctgaggaggataaggccttgggaagctggggcagagcctctatgaagtgagccctccaaggggcggggtcttttgattctacgtgggattttttaggtttagggtggccaagatgactgaaatctgccactgggtaggtgtgcctggcaggaggggagcctcccaggggaccggtctctgggtttcctcgagggtggggttggcctgaggaagggagaagaggggcacgaccagggcagtgtggattgggacagatgaggacaagaacaaatgaaaggcacagcaaccaagtaaggaagataacggctggggtctggagcgttggggctgatggttctgtagtgctgcccgttggaggccccgcccctggcactaacccctcccccttatctcttcgcagcgaggcggctgcgcagtacaacccggagcccccggtaagccccctctgcaaccagacccccttctcctgccaaggcctcttcgaggtcccatccctgttcctgtagagaagccccaccttcctccccttcttgtgaaattcctctgccagttcctcccatgccgtgtctgcagcttcgccatgggtcttagccatgccccacatacgtgcac

SEQ ID NO: 15 - DNA, 2804 bp, Homo Sapiens
ccaaggcccgccggacctgaggtcgcctggggcgctaaacagacccatctatgagcacattcggccaacacacccaagttcaacagtgggcgggatctttggctggcctcgatctctctcacagtgtgtgcaaacgggtacccattagattctttttgcttgtttcctcatctgtaaactttgaaaggagagtatttcccggggtgattctgaaaatcatgccagaactgaaaaggcctgtgtaaatgcgaggtgtaatgatgacttattagaagcagccagccctgtacgtgcctgtaggatagatgctagaacgttctacaaatgtgtgcacatacacatcacgtatgtgtgaaggtgcacacctgtccctagacacttgacaaatgcacacacgtatgcgtgtacctctggctgagagcaaaggggctaatacagggctcatacaggacatcatcctgcagtcttgtgcgtgcacagtacacacgcgagcacgactgtctgtgcctggagacaccgtatggcaccggaggagctgctcagccgtcggtgccacctgggaagtagggtttcgggtgctgctctggagcgcgggaaagtccggatccgggtctgctggtcagcgcttcggcgccgccgggctcctttatctctcatccgccggccggtgagcggctccagtttcaagacccccgatcctgccggtgaggggagggagcgagaaggagtgcgctccgggcccaagaggctgcagggccccactccccaggtctgtcgtccttcctttatctcctcaggtcacacccccacttaaaataaagaagggtgcctgactcattcaggtcagggaagtcggcccccgggagcctcctgccctcacaagccatggtgaagggaggcgaagccagggtttgccacggcctgggagaaaatgcggctgcagggtctctttgggctgcagcgctggcccggggccccaagactgttaaggtgtgtgtgggaggcgcgcagtgtggctaccgaagagccctccatcaccgcaccggcaggccgccgggctcgtcctcctctcatgcttccaagggttctgagctgcgcagcactcgcatcacccagaagtgtctgtggagaaaacgacctcaggtgtaagcccaaggctgctgcctgcaaaggcaatgccgtggagactgggttccacagcgacctgggtttttaagtcaccgaaagctacagggcagggtcacaaacactctcccgccttctctgcagaaccgtgcggctgacaggagagcgttgcgcagaaaattcgaggccgggcgctggaggagtctccgcggcccggagaaggcacagaggcgcccctgagaggcgcagctggaacaggcgatgcacgggttcggatctggccggccaaccgagcccagcggtcgcgaaaaccagagtcgccacagaggttgagcacgattccatttctggggatcgggtccggtggggagccactgtccctaacgcctccagagactttaagtaggacaatataatgctggtaggagcaaggtgcaaggaatttagcggcagaagcctttcgggggggtggggaaaggcagatccgtgcctcgtctgagcctgggggtggggacagcccctggccttgtagcccctgttccggggatcagctgggcccacctaacccccctacatggggttgaaaggggccaatgggacggccccgccgcccctccctcgggattccacagggccctgacccggcctttatctctgcacggtcagcagtcgcgggggcttcaggaaggaggacaaaggcccggtgtcaccgcgggcgggggctcggtttcctggctctctgctcacactcacagcctttagcggttgttgggggaagatttttaaaaatatgtgtcgaatttcctttttttctcttctagaaacaaacaaacaaaaaaggcaaaaggcgaattccccttcactcctcgtccatagagattaaagtttcctgggatcctgccctttttttttctttgactgcctagaaatacttgttctcccttgtacatagaggaaaatgcggggaaaggttttttaaaactcggtttcatactattattattactaaggacaaccgggcaggctgaggtcccaacgtggatgatccgagttggcctcgcgccggggctctgcagccactgccctgtgcgctcagcacctctgggggcgatcagggcccctgcgcttccgcccgccgcccggcagtcgagagcaccctgtgcccagactggccgactcattctcccccgaattttgtttagagctggcaagggggacttagctcgcgccccaagacctgggcttgcagcgccgccaacaggcccggggacacgaggcgctccaggccggggtcttcccggctgctggcccctctcgctccccacccgctggcggcgcctcggtcgcccgcaattgacccaacccgcttcctgcgtttgcccctcaggtttcccgtttctccacaaaggcctaggggagcctcgcccacaggctgaccctgcaacctctggcccggtggctaccttctgcttttctgaaaaagaaaaggaaaaaaaaaaaaaaaaagaaaaaatcaaccagtcgagggaggcgcgtgaggactggaggcgccagccggacagcctatgagtaggtccctgggtcggtgccgcttcgcgggtcagcacggcctttctcagagaaaacctcctaaacgtgtgaagaccgctttgggggaagcgagagggaggttggaggag

SEQ ID NO: 16 - DNA, 2383 bp, Homo Sapiens
ataataaagacgcatatatgtatgcttttataaaatttagctgagactctatttttattttacaaacattccatttaatagtgcatgaacttaactgcagacaaagagacagaaacagaaacgaaggaattcctcaactcccgattacagttagagagatatttttctaaaggaatcttctaaggataaacgtacactaaattaagtagaagacattaagatttggagtggttttcttattcccttttacaatcaggttgattaaggtgtgagttgactttggtacaatgcatccatttcaagtttgatgacgtgtctattactctaaaaggtcctcttgtgccctttgcagtcagttccgccctccccctgaggccagcagtcaatgatgtagtttctgtcactatacaggttagttttaactgttgtagaaattcaccttgatggcgccacacagggtgcactcttttcatcactcggcataatgtttttgagatgatccacgctatttcatgtttccgtaatgtgtcctattttattgctgggtagttcgggtagttggggtagatcgcagcacattctggcgacaggtgagactgcggttctgacctgcaggcctcggtgaacatgagcaagggcacctgggcgccgggagagacctcccttcccctacagaaagcaagcgtgttatgttaacaaccgaacggggaccctgctttcatcccaaagaacagcacccgactgcgtagtttcttccctggctctaggaggtgagaacacattccccgctagcacagacatcctacaaactcctgcggaggctgcggttagaagcagaggctgtgtgaagggtgactctgggggctatgaaaaaacacgaaggttttcacagagcatgagaacccaaaagactggagactatgaagcgatctgcaaaaagcagccccaagtagaaagggaagagaagagccctgcggccacttagtgttaaaagagctcacggcggcggagaggataacacgttactttctgtttcccatcattgcgactgtaaggagaacacttaacatgccacccaagccacaaaactgcagttttaagaataacccttataggggagtctattttttcattacaaaaattcaggggaaagcgcggacgcagtcccccactaccacaaattatgcagtcgagtttcccacatttggggaaatcgcaggggtcagcacatccggagtgcaatggataagcctcgccctgggaaaaccaccttcgtgatcatggtatctcccctgccaggtaagtatgacttcacacacttctgccctgtcacagctccatatacctcaccctttacacacatggtcacttgccccgcgcacccccgagccttcctagccctgacacacagctgggaccctcaggtccgaccagcggtcctgaacccgctcccacggcacgggagctccttcgtggtgaaacagccagtggcgaagcagcagcccctgcgctgcctcatctacatagaagtcgccctatccgtgatgtcaccgacagcgccttcctcgtcccggtctgcttttctgccccaccctccgccactcagccgaccaacatggtgccagagcctgcgggggcagtgatgtctgcctctgcctcctttccctctcttccccgcccatggtcttccccaaagaagcgggtgtttctgttgtagttttttgtttgttttttgttttgcgccgtctcgctctgtcgcccaggctggagtgcagtcgcatgatctcggctccctgcaacctccgcctctcgggttgaagcgattctcctgcctcaggcttccgcatagctgggattacaggcacacgccaccaagcccggctaatttttgtgtttttagtagagacggggtttcaccatgttggccaggctgatcccgaactcctgacctcaggtaatccgccgacctcggcctcccaaagtgctgagattacaggcgtgagccatcacgactgcccagaagccggttcttagcctgtgttgccgaggacctctttggcagaaatctggagcctgtccacccttcttcaaataatggcttgtaatgcgcagactaaaacatggaggattacacaagaaactggttcacttcacatcattatccttgtgatgtagcattctacttgaaattggaagccgttcgatatcagagaaaccatatctatgaaactagagaggctgctcagatgactgcaaaccagccatccttacttgttttaccactagtagtgttataaggacggtggtccaatttcaggaatcttgtagggttctttcaaatacagcaatgtacaaatatgctgccccagcagagcacactgga

SEQ ID NO: 17 - DNA, 2417 bp, Homo Sapiens
aggcaatctgcccacctcagcctcccaaagtgctaggcttacaggcacccgacaccgcatctggccaatttttggtatttttagtagagacatggtttcaccttgttggtcaggatggccttttaactcctgacctcgtgataggcccgcctcgacctctcaaagtgctgggattacaagcgtgagccaccacgcctggccccaggaaatctggatttttaatgtggtatctccaaattctgaaactttggcaactaatgcaatttttagaagactgtgggccaggcagactgcattctatggaggtagaaaaggaggcctgaggccgggctcggtggctcacgcctgtaatcccagcactttgggaggccgaggcgggcagatcacgagattaggagtttgagaccagcctggccaacatggtgaaaccccatctctactaaaaatataaaaattagccgggcgtggtggcagcgcctgtagtcccagctactcgggaggctgaggcagaagaatcgtttgaacccgcgaggtggaggttgcagtgagccgagatcgtgcccctgcacggcagcctgggcggcagagcgcgactgtctcaaaaacaaacaaacaaaaaattagccgggcgtggtggcgcatgcctgtaatccagctacttgggaggctgaggcaggagagtcgcttgaacccaggaggcggaggttgaggtgagccgagatcgcgccattgcactccagcctgggcaacaagagcgaaactccgtctcaaaaagaaaagaaaagaaaagaaaaggaggcctgagcccggcgcggtggctcacgcctgtaatcccacgtttgggaggctgaggtgggaggactgcttgagcccggaagctcgaggttgcagtgagccatcatcgcgccactgcactccagcctgggtgacaagagcgagaccccgtgtttaaaaataagtttaaaaaaaaaaaaaaaaaaaaaaaaaggcctgtaacagagacgcgactctccaaaatgccacacaggcaagtgggggccgcacagcccatggtttccagaaagcttctcttgggaatgtaaaataacacttaccctgggacttctagtttctaaacctcctgagcctagaggccctgaagacggaccaagtgcaaagtccccgaccccatacaccgtcctccgctccctccgcaccacacccttcattccctgagcaccgcggttcctccgtctccgggacttcgccctccgttacctggatggcctgcaaggccattacccgccactccaccctatctgggccatgtcggctgcaagcttggcttccactccgcactcccggagagccacgcgcagaccctcctccacggccccatcacaccctcccaagacaggcagcttaggcttgcgtcccctgccgacacccagcaccgaggggcagtccccgaggccacgcagacctccccaacccacacgcacagaccgacccggggaaccgcgggagccagtcccgcgctggggcagtggcagacccgaggcgtgaggcgcgcatgcgtagcgcggcctttattgcgtcactgcgagtccagagcgcacggctggatcatgagcacgcccgcgctggcgcctgcgcgcttgcgcatcttcctctgcccggcgcgcgccgcagccgtcgggatcacctcggggttgcgctgcttctccagcaagtgcatgcgcgccatggtctcagtcagcatgtctatgagcagttcctgctgcagcttcaggtagttgttctcctccagcaacacttggcttttggaccgctgcacctgcgccttccagccccaggcggtccgcgagagcagcggcgaccgcgtcctcgccagctggctctcagtggtccaccgcccgccgcggaacacgaaggcctggttgctgaggcgcatgcacggcgcgccgtaggcgaggcccagctcggcctggcgcgtgttgtggtccagcaggtagaaggtggacagggagggcatgcggcgcagtggcggccgccgtggcgagaagggccgcgagatgtgatcggcccaaaactgctgcagcgtctgccacaggcggctggcatggctcgtagccgagcactcgaaggttgccagggcgtggaccttgtagggcacgcaggtgctcgaaggggagcctcgggagcgctggcgactcgtgctgcgctcttgtctcgggagcccggatgtccagaatgatgaaggcgagccagggggcgctgctgggagacaagagtccgggtgagcagcgtgcttggtacaggccgcctctcaaaccgcgaggccggcggacatgtcttagccctgcagctacggctgcggctgtgtctcaccagctgctggccaccgaggagcccgtcgttccacgctgcacaggcag

SEQ ID NO: 18 - DNA, 2195 bp, Homo Sapiens
cgagtcccccatcctgcgcccctcccgcgcctcccccatcccaaaccccagcagcgtcgctgcctctcccggaaacaagcccgctgagcaaaggcggaggaaaaccttgggccttccgctctgattggtctccccccgccgagcggggcgaggcagcgattggctgccgggcgttgtcagtcgccgaggccagagccatcgccggggaagcgcagccgggctcgggtgcttcggctgccgccgcggctgctcggctagtgcagctgggcgagctcgcgcgggcgccgccgccgcctctgctgctgcccaccccgccgcgccgccggcgctgccggtcttgcaggcggccgccggggaggggcggccgagagagcggagcacgaggaggcgggggcggcagagaagtgatgctggcgccggggatcggggcagcggcagcggagcagcagcatcttcgggaccctggctgcagcgtccctgtggcccgcgcgccagcccagcggccggagaccacgcgccccgcgggtaaggttctgtccggcagcgcccgcgacgcccccgggacggctggcgtggtctttgggggttacgaggcgcgtggtggccggggcatcccgacgaaggtgttgggacccggactgcgtgtcccgacgctgggctgtgctactgcccgcgcccgtgcggctccagctggtgcgttctcccttccgcgctcacagactttgacagcgcggggatggcattgtgtgagtgtggatgtggatgcgtgtgtgcgcgcgcgcggcttggggcactttgcagcgagaacagtgggtcccctctgcgtggcccgacgtccttcaaggacccaagctgggctggagtgagtaggatgctgttggctcggcgggaggtagaacgcacggagcgcacgggaaagtccaccgtggctcgtaaagagccgagcaaattgaactttattgcggtgattaaaaggagctgtggacctggcgcgccaggggagaggcgcgttccacgaggctccccaaagtcccactttgccccggggacttcggaggggaagggaagagagggaaaagtaactgttggtccacattgctgaagaaaaggaggaaagagaagttgggggtgggggtgggggtggaggttactcttgggggagtggcgacttttaggtgtctgaagccccgcgtgggaggcttgctacacttttctggagcgcagacttgaggatggagagtcccactctgaggtactggtagcggctcctcctgcctggtggcggcgtagggcgcagcgggacagcttggtggaggcagagcggggctccgacgcccgacggcccggcgtccaggtggggccactgcctccccaggccgctttggcccgctgacctcccaggttgagacccggcctggtgcgcctctggcagctgccaaatgcctggcggctccgctttccgacaaagttcaggcccgctggggtctggtccatcagacctaggacacgttaaccacgcagagtaaccaggttagggtacccagctgcctccagagcgtttttgtttcatattagattatcttatttgataaagctgttgagagttccacccgtgctgcaaagccttccgcagaaggcgaattctttgcgctgctgcaaatggatggtgctactgggccagatccgaatctccgtagttcagtgcagtgggttctccatccctgctcaggacgcacaaacttactcttggcgattgttttctatgtggctccttgtctccgtgggagtatctgcttaggaaagttcttgaaatacctcaatactaaggagctctccccactgtctcagatggggcgaggctccggtacttgactggcgttggggttgcagcagggaatggaggtggaacatcagctccctgcctgccagctttggtaaaacaaaaattggctcaatacagggaggcggatcttgaactggggacagcatttttcttgttatgtagctccgtaatctctttcactagagggatcttttgtcccaaaacaaaacaaatcacaacacaacaaaaatacccaaaaccaaaccgcagaaaccactttgattgggctcatttctgatttggtaaaccagagaaaatgaaagtaaggcacgtaatagaaatgctatagaaaatcaggagggagctgtccaaa

SEQ ID NO: 19 - DNA, 2463 bp, Homo Sapiens
tgtacagttctccagtacaagcaacagtagttcaacctcaagaaaaagacatcttaaaggccgtacattaaaagttgccagggatccagccgcttacatttcatgaaaagtacagaccatacccgtttagctagctgtgcaccttaactggtcgagaaggcgcgctgggggctgggtttgagggtgagcaaaaggcaagattattagtttgggttgacgtgggggtcaaggggagagcagaggaataatctgtaagatctgagtcccgaagctctttgggttatggaggttagaaaagggcctgttaaagttaggcccaagtttcggcaaggtggaactgggaaaaaaaaaaaagaaagaaaaaaaaaacgaaacccgaaaaaacaacagcgagcaggctcccgagttctagcgttcacagtgaagccgttaaacgcagcaggaaagtaggcgtgtgttttcttcctcttcccgcctccccagagactcgagcccagtcctttcccctcattttcaccccagccgagtccaatggctgccctcgccgcggagtcgggtcggaagacgccccgccccctcgccgcgttcgccctagggaacccctccgccccaccttccctgcccgatgaggggcagtggctgccgccgtcacgtgtgctggcagccgccaagtgaggccgcttttgcgacgcggtgacagccaaatggtgcgacaggaggagctgcagccgcggccgcagcgcccgcacggagaggcttgaggcggctcctggcgtcgcccagagggagcgactagacgaacagtccggtgagggcggcgagaggaagcccgctacgagtgccctagctccccgccgctctcgatgaaccggacggaataagccgcgcctccagcaggggctgcgcctccatgaatccctagttgtttttttttttttctttctctcccctctcctcacccccaccccgagccccgtcccgccttctcccttcgccagaggcggccgcgtccaggtgcggagtccataccggagcgcaatggcgtccaaccccgaacggggggagattctgctcacggaactgcaggtaagggccgcggccctggtgagaggcgctggcggaggagacagggagagagccccgcgcggcgtcggggaccgaggaaagccctgcggccgccgcgcccctagcccgctaagtgcggaaactccgggatgtcactcgggaaatgcttccctcggggaaccgcttccctggggagccggaccctctcccccgccaaagccctggcctgccaccgctttggtttgattctgcctaccagaggggaccccatctctgcagccctgctgcagcgggagcctgctctcgcctggtccccggagaggccggcccgtcgccccctccctcggtgtcagagctacccgcgaacgcccctgttgccccctcccttcgcgcggccgggccccgccccgcctttcctccgtacaccgctccttaaactcctttgaatgactcccaagctgttttcttgtccctccccctcccctcagactccgcacaaagagcgcccccataacttccagcccctagacaagtttttttaaaaaacgagtctcaccaaatgtttgcttcacttcagcagccctcttcaggtgacagagtttctttcctctattttgagggttatctttttcttttcttttcctttctttttttttttttaaccgagtgataaatacagggtgcctttctctgctacccctgcccagatccgggagctcagatgctgatgcttttcagactttcattttccctctcatttgagcaccagagaaagagctaataagttgtttactaatgagaaagcagtcgactaagggaaaacattgggcaccacatgtctgcaaaagatgagagcaaagtagatcgcttagttaagtcatgtcgagtagcaatgttatttcccatttccagataaatatttgataatgtaggcacgattttctttagatctctatggtgtacatggggacttaagctaccctgtcgggtttttcattacttgggagtgttccagagatgtttgttttttgacttaaaagttattttgctttattttaatatagttatcttttagctactcaaagattgtagatgggaattaggagaaaaaaatagcatgcctgcatttctttttgtgtgttggacagttaattttttttaaaaaaaagactaaatcaagaaattctgaagagttgatgtcaaaattaagtattgcaactgcatctaaatttcttgtttaaatatactttttaagaaatctctttataagtttggtttcttgtgcagtcagacgtaagcttgaaaactttggtataatggttgatatttcctccacaaaaatagagactttaacaatgtatatcaatgcagtgttgcacatttagaatcctttggtaa

SEQ ID NO: 20 - DNA, 2297 bp, Homo Sapiens
agaaaaacaccaccgtgtccccccgtttgcatttaatacactcaaggctcctcatttattcctctggaacaaattcccagcaaatattcacccatcgatttgggagcgatggatttttataaaggtttgatcgctttctaagtggtcgaagtgatttgtttccgtggtcttctcagtattgaagggggtgggggaagcggatttgagggggtgcatgtccttgccgtcggtgggctcactttctaaaaactattgagatgcgccagggtggccgtgaccaagcgggcccagggtcaactgtgtgagggggaagcgcccctcagagcgcgcgcagcgtcgggggtccagcttacgccgctgcgcgcccttgtgcgcaccgggtgaggatgccgagctctgcgggcatcccggaagccgcggtggaggcaggggccccgctcggcgcagtgggcctgctggggaggtgcaggggaggtcctgactcctggtctattcccttccagactttttcgttcgctcccggaccttcagggctctccctcaaactttctcctgcccccttcacgggaggttcctgtagcctctgggccttagggtcccgtaagcctcgggatcgacttgtgcccggggtgggtgtggcggaagcttgaatcggattacccaggtacgccacctgtagacgtagtgggcgagggggactttgctaccttctcagcttcttccctggaccccgcagcgaggggaaccaaatctctcccatgatagcccctctggcgtcagtctggaccgagtggctacaggttggactagggtaggcagaagatgcacttggcaccttaccgaacggtatttgaatccgtctccattactcattaatggcgtgaccttaggcaacccatctaaactttccgaacctcagcggtccccatctacaatatgggggttaatgataatgccttctccgcatgtaggtggattaaatggacataaagcgcctacccccgcccggcacgtccaaaactctcattaacaggtcagctaatcttattacgagaggaaccctccctcctccgcttcccagagtgtgggcggcatgaggccacggaagcagctgctgcaactagcatttcaaaatccagagactttctaatggtggcagggggtgaaagggtaggggggaggcagggttgggacaggtagaggtaggttcttggggacttccagtcttggggaccaagcgcttggaactagctgggtttgggcagaaacaagaaggcaaatgacgggaccgccgccggagtccggacttccatccctggagttcactgtctctcccagggaacagaggagtgtcctggtttctcagcaatgaaccaggagagtgtgagaaagagcatttgtttcttctcccgtggcccgacaagccactcttcggcagttctgcgagcagattaattgaaacgggcctggaacttcatcctctcctcccgatggagttgctggaggtctgcggacactgcctggttagcctccgggaccacagcgccgtgggctttccctcgtggtgtctgccttaaacttgggtgctatcaatctatccaacaatgacggatgaccttgtcataacgacgccagtcaaaacattttcggtctaactctcttccaaccaacatcgaagcatcctgaatgagacccggatgaagtctgaacagcacgtttcccaggttcagaaaacttgagtggtgggaagagaaaaagaaacaagcagaaatcaggaaagaatggctattaattgctcagattggcaagtgctaaataagttaggttgtttggaaaaagataaatgccgtttcttctctttacggtatggccagaaccccggcgatgggaaagtacctcctgagtcggtcaatttcacacaccctgcctgtgccctctaccatctactaccgaaaatgccaggaagagctggggggcaagtgcctccttcgtgggtgcgagactgcatcgaagggctgccctggcacaaagtctggggagaggacatggtggaggtggggctgcactcccaccctgcccctctaacaccaggttttgggtagagaaacctatgcgtgacctcctgcggcagccgcaggcagctgaccgcaaacagcctcgcccgtgtcccggagcagttgtgccaccagacgtaacactggatacttgtctccgggccccaagaaggagagggaaagagccctccagaagacaacccgagaaggggtcagcagagcgctgggtggagtgcagactcc

SEQ ID NO: 21 - DNA, 2177 bp, Homo Sapiens
gtggttaagagtaccaatagaggcccacatagcattaacctaagtatttaagtcataaatcaagataacaaactgttaaacaaaatatgatctgtcctcccaccttgacaaatacctcctacacggagctggatggccagttgtgaactatgaattcctggacttctctaagggccaggctggaaggtgtcatggaggataaagctgatcgcgaatgatccctcttcctgcattacgaggggcccaaagcacctgggagtgcacaccttagcccacaggtccaggtactgtccacaccccaaagaagagctatttcttggacacaggagtgagttcagagtcccgaccagatcctgaaagtgaacttggcaccatttgggcagagcagtccagagttctgactacatggagcgtatgtagtctagaagagggtcaggctccagctgggccatcagcctgaccggaagaggggcactgccagaggagagccagagggtggctgtgggcggaggtccctcttgggtttaagagccagtctgatcacacagcctctaaaatcaccctaagaaagaataacataccggaacattcatgtgacgggtaagtatggtccagtggttatgagactaggctctgcaggcaaatccctgggttggaatcttaggttggccactttctagttgtggcatcgcaggcaaattattgatcatctcacagcctcagtttcctcatctttaaaatgggtaaataatcattattatgaggagtggcagtatatgtaaaacgcttggtggacattacacattgggtggatgttgacagggttctctccagcttaggcgagtttgcctctgagaggtttttctggagaattatataagcttcataacatccaagcactctgacagtcaaggtgaaagtctcctctctctactaaattggggtgaggcgcgggtgtgggcaccacccaccccacccaaggcatcaggggcagcccacgtcccgcccggttctgtgcccaaggacttcacgctgcagacgtgcacggaagctgctttggccaggggtttggaggttaactagcaaacgcagcgtgagtcacggcggcactaggaactgaaaccgtgttagccatgcccaggtttaccctccgatgcggacggtgaaaccagggagcagtgacatcaggacggggagccagcgctgacgcagctccaccgcctccctccccatcccgcacccgccgccgccgagctcagcctgcagacaggtcttgacatccctcctcagcgaggagcgagggagtcggaacaagtcggggcatctcccttgcacctcccgggagcgccagcccagccaagtctagcgattgcccggcccgccagcgaagacgcttcctctgaagcaagcttggacactcccctacccctccgggtgaaacgaattccaagtggcccatttcggctcctcgccccctcccactccctgcaaaaaaacttggcaactctgcggtttcttgcggaccaaaacctgtaattagccctttgtgctccctttaaggggcagtcgtgactggaaaccgaggagtcagaccctctcgaaaacaccaacaaagaactatatttagttctgagctctcagcctaaatgcctcttattttttcacttttacttcaaaacgccagggttggggaagtgggaggcagagggtgggggagcaacggagaaagaacagctgtgcctccgcctctccgctcaatctctataaataaccaatcgcgagcggaggctactttttagccaatgaagcgccccaaactgataaagccttggcggcagccaatgaacaacacttaggggtgtcagactcgcgccccgagaccaatgagtgcagagtctgggagaggtaatttgagctagagtgtgggtgtgtggtgcaaaagcttcctacttccaagcccaaaaacctgctctgcgactgagcatgccctgaactaactgcgggcgccctgagacttctggattgggatgtaatccggtctccgggttttgaccgcactcgagcggggaggtgggtacgacccgcgggaccctgccccgagagagctgcaggtaccagaagctacccctttcctagtcggaacagtatctcagacttggagtacctcctgttttctt

SEQ ID NO: 22 - DNA, 2590 bp, Homo Sapiens
gcgttgagcaggcgcggtcacggtgctcagatctcccgggggcatttcagttcccgccatccagtggcccacggctgcgggctccagggtctgaggctggggactaccgttgccgccgcagtccccatatcccgaagttgccttgctgcttgtgttgttttcgcagatagcatttttggcgctctgtgcgttccttccctccccctccccctttcactcgccctcattgtcctgagtctttgaaagttgggagaatcggagatacttctgaggactggtaatgaagtctcacttaagtgggatgcaattcccgccctcctacccccctccaagaaggaggttgtgttttcattttgttttgctttgggtgctgacctttaaaaaattagagcaaaatgaacgtgaacaaaaagaaaaggagaaatgtttcgagctggggcagagggagcagagaaggagccctcaccgcggccggaatgcagagcggaccctggcccaggactgggtttccctttaggctcgggcctaccctggccctcgctgttggaatctccaggaggtaaagcgacctcgatttttgttgcccgcattcccgggcgtgagtgtccttcccaggaggctcaggaggccgtttctgttgcattctgagcctccgttgcaaaaactgaagcccgtgggtctcggcaggcctcctagctcgctcgccccgggacaggccctcgcctacacccctggaagtaaggagccccgggctctttcgtccttttcggggtgtggagcccctggggcccttgaaaggtgaggcctcagaggcgagggaggggtgagcggggagctctgcccgcctgcggctgcgcccccgctgtggactaggaggcaggccaaccctccggactttgggggaaaaaccacagcgggctccttgcggaaactttggccgttctaacttgccaagagcctgagtgaggccttggaagcctccagccccggctcaggtcgggacgcggctgctgagctttctcaggcccgcaggacagcggcccccgccggtggcgccgctgcatttaggccctttccagaccggtggcggcagccaacccgagacttgcgtccctcgggcccggggcagctaggaggtcggcgcgcagcgggccgggtcaggactgggtcgagcagacagagctgcagcccccgccttgcccggcttctcgcggctggagagcagagcgatgtcacccggagccccgcctgggtggtaacgagaccctggccagtcacccctgcagcccagactaacttctttcaacagcctctgatggtaattacagtaatcgaagctgccatatatctttaggcaattatgacacacaaaaagccccgaggggaccccctggcgagggaagttaagaacggttttccagcttcaggaaactccggctcgcctcacgtcggagctcgctcggcttgctaaatgagaggagctttgcaacggggtcaaccagcttgtctcgtgaccccaagtcaccttaacgtggctgggtggcggagtctgaggcacaggcccgctatgccccggaattttcgcgtccctccctcctgggccccgccccagcccggttgcctgtttctaatctgccccgggagccgcggctcagaggtctgctcagaggcaggactcgcactggtggtggcctagagggcaacagtccggaagctcgggcgggggaatccgaggaggggcccccaccctgcactggtcttccctccaccctcatcgggttctccagagatgttgtcatgggcctcctgtccggatgggaagtggggaaaaagagaccccaccactgctcctcccactcactcatcttggcatcttcaacagtgccacagggaagaggacagctggggtgacagtactgctgggccccaaacgtggaccctggagcggtcagagggcgcgtgttaagcagaggatggttgtaagatatggaaaccaagtttaccgcttccagagtgagtgcagtgcagcggagctccagacccggttcctgagcgaccaggaactcccttgggcgcagtgacaggcccgaaggagtggaggacaagacccgctgtgcccttgcctggccctctccagcccctccctcccacagcacaatctcccctcccgccctgtgggaggggggcgccgagccggtggccgccgcgccgcgcgcctcccctgcccgcctttgtcgccgtccgaattcccatgctactctttttgacgggtcactggtggctctataggcaggtgctgccgcggggttgtaattacccggccgagcctggtcgttaccgaacaccccctcacccccaagcacggtcccccgcgctctccttcccccaccccctccacctgagacgagtctgggacccacggtgcaagctcgcccggacgcctcgggttccaggagcaagtttacacctgcggtgcctcgaggccctccccgcgccacgccctcacctcccctactcccctcgcccagacgttccactgccgccccttcccacctcaatcccatcgtagtccccaacccaagcgctttcg

SEQ ID NO: 23 - DNA, 2646 bp, Homo Sapiens
gggttcttgccaaatgtaagagggatttggctttactgccacttagccggccgcgaaggcgctgcggagcccacccccgcccccggctcgagactgcggcggtgcgcactgagcctgcgcgcggggcttttctcgctgatgctgcagatacagagctgagaggttcgggtgccagcagcgggagggttagcgggaaggccgggttccctgccctggcctcggaggaggagccaccacccctggggtgatgctactttcacagactggaaaatactcgccagctccctgacacacacttagacacacttccatccaacgggcatctacgatcccctgtagggagagcttggaaatctctgccgcctctccctcctcattcctgttcctgcgcccgcccaaacaaccgcgcgctacatctgctcgttgactttattggtgtttgtcttgtttaaatcattctgcctcgtcacccaggtctcgtaaagaatacccacactggacagattttattttttcggctttaaatttttctttgaggggaggcccttaaatgtgtatggatacgtcaggcgagctgaagactaagcaaatcccagcagcggccctttctctctttcgagatggtaaaaattctccccaaatacctacagtccgtctcagtcgtcttaatcctagccgggcctcttcgtttacagccactgaaataaatgagtaaatggctcagttcaaaaacacaaccagacctgagatctgatgaggccggctgcggtggtcgtgaatgaaaattggagaagccttgcttcaggaaatagggacagtcaagggacacaaagtcaaaaggagagatgggaaagctggggacactttggtacacaaagttgccattaaagtttatttcccttttatccagataggtgacgctacactttgccagttactaaaggctgcaggtttctgctcagaaaataatatcgaggtttccaacatgtgtttattccccaggcgcgcacacacggtctacccccgcaagcaagcacgacgacaggaatgtcaagcatttaaacaaagacagacatccttcaccctccacccaccgccgcccctgccccccgcaaccatccaaagtctgagctcccaaaaaaggatctttctccagctctctggagtttgatgttctctcttcactactgcagcccgtcatggtttttcagaacagagtggctttctgggcgctcgtaggttccccaggaccccgataaccatgtcctaaccaagatcctaaatcgcgaaccggagacactttccggggggaggaggacgtcgtctgagagggagggagaaggagaaacctatcctgacaccagctccgaaagctctcacgcgtgaactgggcattagtcaagggaggaggaaatttaccagcccgagggagggaaaacaagtcccccagagaagacggcggtactcgctagggagggggactgggctttggcttaaagaggactggctgggattgggcacactttgagcggcccctggagctgaggctgggctttcccgagcgcggcggctggctgacgctccctcccgcctccttatcccgggccctcctccctcgctctctcctagtgtgtagtttcggcggctcggctgctactgccgccgccgctgcagcagcagcgtcagggacaagcctgatccgtgagcgagcgagcacccagcagcaaccaccactttgggcaacttgcgggtttcctgctcgcgggtagcgaacgggagattcccactagcggttcagtgtctccgagccgctgcagcccgaggggcggcgggagcgcccgcaccagactctcccagacgcgaaaagggacgagacaactgcggaattcaccagccgtgccagggcacttccgaggccacaaccgactgacactttttctccccttggcaaactggatttttttttttaagctacttggcagctgtctctgactccacctccccctccacccccgcccgaaagcctttggcttttcttcggaaatccagacagaattgggcatctttgttaattgccgttggggacgcccggccgtgcgctttcgccggctaacgtcgcctgtgctccgagcctggtttgctcacctttgaactgcaaagggatcaagttcagcttgagttccctgcattgggaaggagagagagcgtgcaagagagcgagtgggagagggggaaaggggaaaggagaggagggaggagagagaggagggaggagagagaaagggagggagggaggggagggatcgagagagagcggggagagagaggctgcaatctcctccctgaatcgcgcacagcgctgcagatcccactgctccgacatgcgggccgaatgcaggtgagaaaaggcacggactctgcggctgcgaacccaaacttgggcaccgcacggtgcgcactgctcagccttcgcccccgtgggcgaaaggctgctgcggtttcaggcggctgcttcgtgactaatgaccttgcgcagagttgttaagaaaaaagagaaacccgcgctctccggggtgagaagggactgactctgggcgtctctgaagatggctcgggcttctctttggcgcgccggggggaccctga

SEQ ID NO: 24 - DNA, 2372 bp, Homo Sapiens
gtattgcctctcacatcctcatccgccactcatacagtgctgagatttaggatttccatcttccctctctgcccccacattgcgtgagaagcaagacagcccagacagactgccagcaaagctcagggctctttgcctctttgtccctgcatggcatcctaacaagctcaaagcataacggacaagctagaacttggcgatgcctggagcttgtcccgggtttctgtgaaaccacagtgctggaataccaggggccctgcaaacctctgctgacaatagggaaggccaacggcatgcctgacgccaactgcaggcaggtggtggccccagctacctagggagggtccagtgcagagcctctcggtggacaggctcagatccagactttttggcaaggaggcaaaacgaggcgggagtagggatcaccgtgcgctgcctccaggtcactccgcatctgctgtcggcccttcccaggccctgcgcgggacccgaggtccctggccagcgctcttccatgccttcccagacttcgctgcccccagtctggcgcttctcagagccccgcgccgccagggcgcacccacctcttccaccgcgctgcgcaatttgtgctgcgtgtcctccatcagttcctcaacctcgcggaacatctcattgagggtggcctcctcctgcgggtagctgagagccgggccgggcttgactggagccgaggtcgccgtcggagcgggcgcgggggccgtggggaccgccgccgccagcagcaggcacagcagggtggccccaagccgctgcatctccgctctgcgcccgcagccgccgcctgtgtgtcccggaacgcgatcagaggcgcgcggaccacccccctcgctgggcccgccgccccgccccgttccgccccgccgcccgcccctggcgcccctctttcccgcacccgcccggagacgggaggaaaccgaggcccctgaaaacgcagctcccctacacccgaaaagacgcgaccccacccgctccagcccgagccccgatcgccccaggaccccgcacccccatcctcgagcacaagctgagctctgctcctcacctgtgatgctggagccctcgccagagcaaccgaacccggatcctctacgctaatagctcccaagccccagctcacctagactctgtccccggttcaaaccctagcccctcctcgaccaggtcagagtgcccgacccccacttccacctcaagcctctctcagcccctacctggggtggaccaagcacaggtcagccccctccccttggcgtcgggtcctactcgagcgccccgccccacatccaccaagagaggctgagctcagcagagtcgtcccctcccccgccgccgcccctcacccaccccgactggaccgagttgcgctgcgggccggactggatctgctcgctcccgccgggaggccgccgggctgcgggtgcagatgcgggagcggcgcggtgggcgggccgcgggtgcgggagcgcggcggggtgcggcagcgccggtacccgagggagcccgcaagacgcgccccgcccgcccaccaggctccctctccgcccccgccccgagccccgcccgcccaccaggcccaccccgccccgcggaggggccgcagcccggccattggccagccggggcgccggccacctcacgccccacgccccacgccctcctcttctgcctcagcgaccagctctaccgaaggcagccatctccttcactgcctgcccctgcgcccgcggcatcccaggcccgtcttctctggcctccaggcttgcaacagcccaccgaggttgggggtagggggaatgttcctcagtcccaccttggtctttccaagccaacctctgtcctgtgaaatcctcaggaaaaatcccagcccccagcctggcattcaagccatcaccgctggccttagtctgccgtgattgacaccgtgctccagccaggataacgcacttgcagctcctggaatgggagaacgtcatgagaaagtcagcaagctcctcaagggtggcatagaggagtggtcaggaccagacacctgcagccagctctgctccttcctaacttcccgccctggcgaagttaccagatttgtatgcgtcccagttagccctaatataaaactttgacaagtctcaaaaacgtaataaggagtgggtagtggagaatcagagaagttagacgatcaggccaaacagcaggtgaaggcagggatggccagaggtcctgagtgtagctgactgctctccagcttgaaaccccaagactgcctttctctgcagcactccccacattactgtttaccgccaaaacagccgctttcccttctacttctgggc

SEQ ID NO: 25 - DNA, 2347 bp, Homo Sapiens
catacatccaacacttgataacatttatgaaagatgagccaacacactgaacgctagaaatgcacattatcaatccctactcttatttttttaatgggttacttttttccactgacactcaccttatggtcccagccccaaccggtcaacaggatgtcaaagtagtttaagattcctctaccattgtacagtgatttagttttgaaaggttaaacttacactttgatatctgaccccgataactaactactcttgaggtaggcataagaataccaatctaaaagcatatgggcaagcaacttaacattggtatttatgaatcacggttatgtaacattatttttaaagtgctccctttcatactgacatatctagtttttaagatgtaaatgtcagaaaacaaaaacagaatacaaatattaacctccaaagataactcaaaaacacagaacataccaaaactcaaaagaagttctgtgttacttctgagcacagcagagaccatgtgggattcagtatcacaaataaaagatgaaccatatacccagattaattaaaattaaacatctctggttgattaaaaaaacttttaaccccaattatttaactttcaataaacgctacaattaaatgactaagaaacaagtcactcgtctgattattttctttatttcaaaatgaccctaccttaaccaatctgcttaacaggttcagaacctcttccttcatcggaacggacgggaaattgaaccattccagcaaatgaagaaaaagttgcctctcctgaatgagatcagcgtagcagattaagttgtgctcaatcttgcagagaatactcttgagagcgcgctccctgatctcggccagctgatgacctgtcaacgaacggcacaaaactattttatttcccgactgcaaagagactacgttatttatgctgtgggcaggagcggcgtgaagacggaataaaccagtttttttcagaagcaggccactggtgccttcgggacgcgaaccgcgaagtttacacaaagtccgagatgggtccccgggggctatcctgacaaagcgggggtgaaagagggagcggtcgcggagcggccggccgcggaaacgtgacacgaccattctcagcaagtggccagagcgcggggggtgccttgggcgaggggcaagctgacagttaccgagtttcctgatgagccctgccaggaccatctcgtcccgtcaatctgcagccgccggagaattaaactgccgcgccactgcgtccagccacaattaatgtacccccggaaacacgtcctgtgggacggtgagttccgcaacgcctgcgctcaccaggagtaggagtcattacgtgagcccttcgcggccccagcgtcgccaggagagcttccagcctctctagaatcactactgcgcacttcctggacagcagtctccgtcgcaagaagcggagggaaaaaaaaaagcaacaagcagggatagaaccagcgttggccgccgcgcacgtcgggagttgtagttctggctaggccgtgcgtcctgcaccgatctccgggcccgccgcggcgcccgctggcctggggttccggcttacagcgcgggaattcgggaacccagcgcgggctgcagaggccccagcaggagccccgcctcccggctcgtcgacggattcgttcttggccctgccaatctgattctcagctcccagaacttcacgatttagaatgtagacttttgctttgtgacagttctccccatccccgactactaaatgacgaaccctctttaactgtgaaatgtacctgcaaagtcaagcagtgtctttggatacccaagttcagatatgaacaagcaagctacaaaagcggggtgggcgggtatgagtgagcagaagagagaaaccgggctgcaaaaaaggaaaataaaggcgggacgtgggggtatgatttgctgaatggtaccaaagttgattttttgcaccgtgcacagtgatcgagctgagcaaattattttttttttaattataagcagcggtaagaacaacaacaaaattacatttggaaaatgatttgcattttctcggtctgatcatttcacgttccctgggaaagggatgtcaaggcaggtaaagtgggccctcggtatccctaggtaattggttccaggacccccgcagatacccaaatccacccatgcttaagtctcttttataaaatggtgtagtatttgcatataacctacacacatcctcctatatgctttaaatcatctctagattgcttacaatacctaatacactgtaaatgctatgtaaatagttgttacactgtacttttat

SEQ ID NO: 26 - DNA, 2224 bp, Homo Sapiens
tttgaaaaagagtttaaaagcatatcaaacatctagcacaccaatcatcactggttattgaacaactaacaaaatctcatctttcaaacagcaagaaggctcagaaggttattagcctctattattagtctttgctaattcttcagttagctccaaggatttaaaagacaaagtctggagctgttctcatcaattccaactgatgccatttggtgtcatagagaattacaagctttccaggaacaaggctcaactggcagcaaggaatcatcaatgattaatttataaaacccacccaagcatctggtggcagcttcaggataatggcagtaagtgatatgcagccaggtgacaggatctctgcattcctaaggttcagaagatggtaaaggaagtggagtaagaagggtttggaatgacgccctactgcgtgttttcaggacggcttgtcatgctacacaatttgaggagtcaaactaggaggggaggcaatttggatccaaagggttcattcagggtaagtagaaggaagcagccactaagattttatttatatgttatttcactgctttctttcatcatccttccctttaattttcccttccaggttcccaaatgatcacattcccgtccccagtagtaaaacgcccgtggaagtagaagatggatgctgtggcaactgaacctggagtcagactcagaatcccagcttcctcactcgggaggaggccttgcatggctgttcatgggctccctaagaaggcagtgtcctgaggcgggcccttgactttttccccatctttgctgctaggtcaaggatcgcgccattctaactcacctgatttctggatcacggtttgagaagcctggccctgtggatttcctagtgttattttccttatagtgatttcctaaggtcacagtttcctaacttctgattttgtagttttgatgtgaaagaacaaaagtgcttcgatttcaaacatattggagatagactcgacgccgggcgggccatgggcattcagcggaaaaccagacagacaaaaagattctgctctcccgaagcttacattgtggtgaatttaaaagttgtttctcaacattagcgctttacccatcagcagccctgcccagggcgaggcgcctcgatgcttgaagttcactgttcaggcgaaggagaacacagtgttcccaaggaccattgtaagctgggcggccaaaatttgaaagaacataaatcgcagggcaacgaaggaggcgggggtctctggaggttacttctattagcgtcaatacgggcgaaatcaggggacctagcaggagcctgaaaacttcaagccaaacaaacagtgagatcacacctcccacccgccacctccctccactgccgccgccgcgagacggctgccccgggggtggcccggggaaggcaggggggctcggagaagacggactctgctttcgctccccctttcttccccatccctaacatgggctttgccctggagcgcttcgcagaagccgtggacccggctctggagtgcaaactgtgcggccaggtgcttgaagagcccctgtgcacgccgtgcgggcacgtcttctgcgccagctgcctgttgccctgggcggtgcggaggcgccggtgcccgctgcagtgccagcccttggcgcccggcgagctgtaccgggtgctgccgctgcgcagcctcatccagaagctgcgagtccagtgcgactaccgcgcccgcggctgcggccactcggtcaggctgcacgagctggaggcgcacgtcgagcactgcgacttcggccctgcccgccggctccgcagccgcgggggctgcgcttcggggctgggcggtggtgaggtgcccgcgcgggggggctgcggtccgacacccagggctggccggggcgggggcgcgcgcggggggccgccgggcggccgctggggccgcgggcggggacccgggcctcgggtcctcgcctggaggcggcgcgagaaggcgctgctggcgcagctctgggcgctgcagggcgaggtgcagctcacggcgcgcaggtaccaggagaagttcacccaatacatggctcacgtccgcaacttcgtcggcgacctcggtggcggccaccgcagggtaagcaaaggggggtgggcaccgcgggcatggtcgattggggtgggaaaaggagcggttctttctgacgcttcaggattcct

SEQ ID NO: 27 - DNA, 2284 bp, Homo Sapiens
tgtggcattgctccctgtaccgtagggctccccgggaccgacagactttggataacagcagttgggaaacactctaaacatataatacatctccaactcccaaacactggagttgtggggtttttttttttttctcttcctttttttgggggttggaggcggaattctttggaaaattctggtattttgtttctccactaacctcaccctctgtggctgtttctattaagatatattttccccctgacaatctctccatattgcacctagtacaacagatgtacctgtggatccactgggcttttattgggttttgggaatactgatgttatttcacttaaaaactaatccaagcttaatgttttgatgaaaatgaaaatatatccacagggaagcaaatatccacagccacccagtcctctaaatgccacacacatctcattttatctaaagtgttttttcttcccttccaattacaaaataattcagtttactcctaggaagatcttcctattcactgtttttagtcatgctagcacatcttcggttttaaggatagagaacagttaggagttacagtattctgtttcccattctccgcatgtttctccccaaccctcacttttcctccctttcgtgttgtctcctctcctctccatgcaaagcagaacaagaagactgccttccacaaagacaataggcttttcccaactgtaaatgactacatcacaagccgcacctgtcagttaatcagtgcatttaagtctttgccagcggatgttgaaatgatgtctgcaataactgactgggtttctgcgagcccagggatgcagacccctccttcccccgccccccgtgcgagtttcagtcgctaatgaaaaccgtatgaaacagattccccttctgttatgtaaccggcttctccctcgcctttcggctgacttgggcacaatgtttctcatgagagtggagatgcctgcggcgacggcggagctggggaaggggacgcggggacccgagagcacggaacgcctcgcccaggtggacgccagctcctcgcctgcgagcagctcagcgcaccgcttacctggctgcggacggggtggcttcactcaatcatgatctcctctcttgaaacggagcaagactgaacaattcactacacgacggatggcgagggaaggaaatgcaaaaaagaaaaggaaaagaaaaaaactggaatcagatggtcaaatttcacatcagcaccgagaggctgttaggagactccattctgctcgcggctgctccggctccaggtccggcttcccggcgtccgcgggtctccacccctccgcccgcccagcctctccagccaggtgcggccgtctccggactggctccctctggccgagcgcggagagcagggctgggcgctggggccaagggaggggcggaggggcgcgcgtttgggcagggacgggggagggagactgggtggaatgaagtggggaaagataagagtggcagaagaaaaaaaaaatccccggttaggagaaaagtggtggaccacgcagagagacgtcatgaaatccgcagattcaatgaatgctactcaattccagccgactggctgagccccgctggcagcgcacgaagcgacgcggctccgagataaaagcgagtgcagcgccgcgtgctggggaaaaagccgcacagcgccggcgcggtccgggaggaaggggcgggggcgagcaggacagagccacagacccagagacgcccaccccgccgcccatgccagctagcgtgtcagcgcgtcgaggaccgggcttggtgggggcgggctgggcacaaaccaacgtgcatcccccgccactggaaacgtgggtgctccatgctgggggaatcttttgggtttcggtccccgaccccccagtcccaacctttctcccagtgccactaagtaagttattcccggagaaacgcctggaaagcaggaaagagccgaagctcggggagcagttttgtctgctggttgtaggggttcggcttttagggttttgtgagataaggaaaaagaggctctgggcactgcctcccaccgggctgaaatccgtgagaggcagccccggcgcgggagccggagcctgcaccgcccagagggggcgcagcgagcggccgggacggaggggaggggccctatccctgagctttgcttgcacctggtggcgccccagcctgctgccccattcagtcccttctgtcctgtccactgcaactgggacctggtcccggctgctgc

SEQ ID NO: 28 - DNA, 2498 bp, Homo Sapiens
taagggctaagcaatgatgcataaacggggtccactgcccaaacttacagaaagcaaaacgtggaaaattagtaactttaactgatagtgtacacctaaagaacctacaccggccgggcgcggtggctcacgcctgtaatcccagcactttgggaggccgaggcgggaggatcatttgaggtcaagagatcgagaccagcctgaccaacatggtgaaaccccgtccctactgaaaacacaaaaaaattagccaggcgtggtggcacatgcctgtagtttcagctactcgggagggtgaggcaggagaactgcttgaacccaggagacagaggttgcagtgagccgagatcgcgccactgcactcgtctgggagacagagcgagactccgtctcaaaacaaaaaacaaacaaaaagaacccacccaacagaattaagtaccaacataataaatacgaagaattttagattcttggtttttaaaaaacatacaaagatgatattccttcaaaatatctttacaaaacatattgagactgtgatgctttatattgattgtatgaaaacaatgaaaaagaaccagcactgtttcactataaaagctttactaatgtaaatttataaatcctttcttaaatattttgagttaattctaattttatgatagaaattcattattttcagcaaaaacagctggcatttgggaaaccaaaggctcaaaaactaagaatagtaaccaaagaaacttgacaaaacagtccttttaaaactctcatctacactataaggggaaactttgatcacgtcccttctccttcatcaatcgtagaactcaacattaaggactacacaatcccacatccctctccgagaaaaagcaaaggctttgtgttgtagcaacaacgcaagacatggagggaagctccactcaagacttccctgcctgctccttccccaaagccactccagaataccagggagggttgagaggtaaggcatgaagggcgcaatatccaatatgagcaacgcgtgtgatgcatctggtcaaaatgcatacagaggacttgtctctgtccctagatagaagtcctccgtcctgcagtcatgagggtcaattgctgaggcttcacagttcccttctctcttacactcggaccgtcacgctcctcacctactaccccgatgcagaggtagactcaggatccctgcacttgtcaaggattcctcggcaagctcacggggcgggagtggccacaagacggagctcgcctggtcctggccttcccggcctatacaagcctgcccccttcccaattcccaatctccacagccttccatcctcccactttcgattcaccttgcgccaccgacgcccctggccttcgtttgcagcaagtttacccccaccattacctctcgcataaaagcctgcatttaccaggtcaaagaggggaaccaacgcctgcaggaatcgcttcaccgaatcgcctggccgcgtcctctgctagacttcacctgccgctgcggaccgtacacaaccactcccggcatgccccgcgcacgcactacctctcccaccccgcccctctcccgcccaaacacgtgacctcctttcgtctccgtccacgcccacttccgttcctccactttcccttaggaaggaggagggagctgggggtgttaaaagcgtagcgacttcctcctcctccccgcccccgctcctgtacctcccgctacaatgtcttccgggtcgctagcgcctcgacgccttctgggaaaatagctcatttcctcccctccccctcctcctgccttcaaccaaccagccacccgtcagagagggacatgcgcagtgagtgcctcccgtctcttctacccgaaccccccctcccccccaagcagagagaccccagcagcagcagcagctgatgatgaagagagaggcagtggcagagggggggcaccttttatttctatttttaaagggacaggacactaattctaccccacttcaaccttgaattcaggggggtggggggaaggcggctgagttccttcccccaccctccagccctgagccctgagagggggattgagcctgagagaggagaaggagtttcttcttcttcgaaaacccccatccacgactcctaccccctcacccctccaactcgcctccctccctccaccctcctcctctttggccgtgagaggaggagagaaagaaaccaaaagcctcttagcaacacagaccctttgctgctgctgttgctgctgctgctgctgttgctgctgctgctgctactgctgctgctgctactgctgctgcttggccctggctggagacatctcactacacccaggagcagccacttccccagctctcctcctcctccttcgcctcctcctcctccactccccccctttattaccctttgtgtcatcctccacagctccagggaaggcactcaaaagtggggggcaggaaaggtaagtgtgt

SEQ ID NO: 29 - DNA, 2357 bp, Homo Sapiens
ctccacgcccctgctgcggccgacgctccagtccctgcctctgtcctcacagggcctgctctgtgcatctgtctctattctgctctgctcttcatggaggaacaccagtgactgacttgggactcagcctcaatccagggtgacctcgtccccagatccttaattacatctgcaaagccctactaccagggaaggttgcattctgaggttctgggcggacatgaattttgggggcaggacactgtccagctcagtgccgggcgccgctgtgggccaggccctttgactcttgcaagcccacgatggctacagagctccaaggaggaggcttcctggaggaggcggcccagctcatcagagaaccagcatgtcttccccttgggttctgggaccagcacttttaacgataagtccttttggaccacgctgatccgggctgagacctgtcgcctgccgcgcgccttgggcggaggttagacaggccgcgcacctccaagctttgacacgtccttcctccaaagggtggaggccccacagggtgagtgcaggttggggatgggccgtggggttgccgggaggggaccagtgggggcttgcagtgttctcgggagggcccggggctgggggcaaccgagacctgcttcggtgggtgagtggagaagcatctggggggtttccttcagcgctggagagaaatgggtgatgaagcctgggaaaggcgtggggggcccgaagcgtgcaccacggtgagaaggctgcgcgtggtcggattccagctcccccgcgtctgcgaaaggctgagctgcgccggccgggggagggtcggaggctgccgggggttgggggatgaagagccgggggcagtttagggcagcgcatcctccgcggaggcaggaacggcaggcggtgcgattcccaccaggacctctgccatcggaaccgcgggtttctgccgggccggaggcgcctgagagatctccgcggaacggcgcgtgaacctgcggccgcggcggcgggtccggatggagatggacgctggatgggctgtttcctgagtttggttcccgtggcggggtcggcccctcgcccctgcatttggcagacctgatgcggagcccgagggtggctgttggcctggggcggggaaggggctctctagatcgggggtcccacctgctgggcttggggagcccatttggccttctctgattggtctggagttgcaggtgaggccacctcaggaagctgctgtatctgagggagcccgggccgccctgggggacgctggggtttgacttctggggctgggggctgcacgggtgggtcggggtctgtctgggttggggtccgcggccgcgtggggtctggattggcgtctgcctggcttgggggtcctcagccgcatgcagtttgggtcgaggtcgggggtccgcggccgcgtggggtctgggtcggggtctgcctggcttgggggtcctcagccgcatgcagttcgggtcgaggtctgcagctgcgtggggtccggctctcatggcccctgtgcctggacttcgctctccaaccatttcctctgcacgtttccctggaaaaggacatggggttcagggtggtggatgtggacaccccctgaaacccaccagccctggtctgtgatgcctggatggaggggccacagccacgccggctcccagcctcttcccagacaccctagcccctggaggcagggtccccccgtgaggcgtatcatccctgagcgccccacacgcctgctcctgggcatcctcctgggtggtggtgtggtgcggctctgcgtccccacccaaacctcacatggaaatggagtctgcagtgtgacggtggggcctggtggggagtgactgggtagcaggggcggatttctcgtgaatggcttggccccgtccctcctggtgctgtcctcgagattgtgagtggccatttaactgtgtcccgcacctgctctgtctttctcgttcccgctcacgccatgtgagacacctgctcccgcttcgccttccaccacggttggaagcttcctggggcctctccagaagcagaaacacctgtgctttccatatagcctacaaagcgtgagccaatcaaactcttttctctataaattacccagtctcagggttttttttgtttgtttgtttgtttgttttggtggaggcgggggtggacagcgtctctctctgtcgcccaggagggagtgcagtggggcgatctcagctcaatgcaccctctgctcctgggttgaagtgattctcctgcctcagcctcctgagtagctgggattacagttatgtgccaccatgcctggctaatttttatacttt

SEQ ID NO: 30 - DNA, 2193 bp, Homo Sapiens
ttgcagcataaaggaatataaaagggcagagcaaagtcttttttcctaaggtgaatatttctaaggtaagtattcatttgtaaaagtttttttttttcatcatgtctgaaaacccattatcacgcggttagtattacaagagacatcccttggttaaaaaaaaaaataccatcttgcaattcagcacacacctgcagctggtgtgctcatccaaaccaatcagtaggctaagagaatttaaaattccatacatatgagtctaggtattaatgccgattacacagtacacagtacagagggaggtccctatatccacacacacacacaccccatccagcatttacaccaaaagccttaccctttaaacacctttaactatcctgcaaacagtaaatgcatcattggccaccacctccaatagttcgtctttttttttttttattttttttatttttattggtctctttgtgtgataatgacctacacatggacagggtccaaaccatctggaagatgtctgattccaggctgaaaagcagttctcaacaaaactggtcttctgcagccaccacaaagcaccaggaaaagggcacctccgcggccatccccagccaggccagcacagcgctccgtgcccgctgaaccgtcccaggcagtcctctgatgacccaaaccaccaccacctttgggcccagagcaggacaaatgaaatttcaacaggggcctgccctgtgaccgaaaattactcagcttcacagcccctgaatgcaaggagaggtggtccccccagaaccaacatgccccccaaggtgggtacgcccacggttctgggaaatgcatacctcaggtaattcacaggtgcgatcccccagtggaggcggggcagcctgaacttctggccctgcaggagtgggaagaaatcgcttttgtctttccgacaactgagccttccacctggggctgggagggcggacagcaggaccggctcttccactccccaccgcggccccccgacctggtcagtagctctggcgttcagacaaaaggtcccctgagctgggggtggggggcaggtcgagagtaggccggtaaatcagacttcgcagctccttaagtcaccagtcctgcatttgggtgcagagattccgttttaaaaattcgaagcatcgctttggttcgctctttgttcgcgggcgcgggttctcgctcatccatccatccatccatccaaccatccatccatccattcattctttcttgacgcactcgctcgctccccggtcgctccgggcgcattaccgcttcttcttctgcttgagggacttcctgcgtttcaggatcatctcatagagcttgtccatgccctcggtgaggccctcgccgatgatggcgcacgccggctggacgtgataggtggtggccgggataagctcgtgcagcgccagctgcttctcaatctctgccaccggcagcgacttgggcaggtcctgcttgttggcgatgaccagcagcggcgtgccctggttctcggcgaacttggtcaccttgtgcagctccgtcttggcctcctccagccggtccacgtccaccgagtccaccacgtagatgatgccgtccgtgcagcggctgtaggacttccacagcggccgcagcttctcctggccgcccacgtcccagaagtggcagctgatgcccttggccgtgccgttgctcagcttgatcttctcggtgttgaagccgatggtgggcaccgtgttcacgaactcgttgaacttgagccggtagagcaccgtggtcttgccggccgagtccaagcccaacatgacgatatgcagggactggaaggccgagatgttagaggagatgttgcccatggctcctggctgcggcgccagccactgcggctgcggcgggagggcgccgccccccgagcagtcacgggcccgacgcggccgggcgcacctgggccccgcccgccgccgcccgcaccggccccggggctcggcgtccccgcgggcgcacggcttggcgcgctcagacgccgcagtccccgcgccctcgccggccgggctcgcgatcggcgggcatcgcgtctctacgcgcggctttgtctcccgcgaagccgcctcagatgttcggcgccctccccaggcctgggctcgctctgtggtttcctcgggccgcgcccccgcg

SEQ ID NO: 31 - DNA, 2410 bp, Homo Sapiens
atcctctaaagatcatgcaaaaaaaaaaaaaaaccaacaaacgtttactcttggatgtttaaccttggctccgacagaatgttccttgtatcaaaaaacaagaactcagccaacaatgtttttgttgttaaacggttgcatgaagactatgtccagtcaaatctaacccctcaccccgctccaaggctatgaccctcaattttcatcaaagttcctaccatctcccactttgtaaaggccctaaagaagttaatgaagaaggcaaagttcctgtcctctgctgtcactcagtaatgagcagtttcatgtggcagtgcagaaactggggtttgagaaacagaggtgtcctgacactctggaccggtaatcacgaaaaccccagcactgccataaagatgctgtcttaactcggctccaaacaaagttctgtcggcggccggcagtgtttcagtgggcagcaatgtggtgataccttcacaggatactttataggcttcaaaacacttccctccctccaggccattaaccttctaaaccacacagtggggtatggctggagtattctccccctgaggcaagggaactgaagttcaagaaggtttcttgacttgccaagatctccccgctactttggctttaagaaactgggtctaagaaactcaagcttacggattctctgttctctgcgcgctcccaccacatcttcaattcaaagatccttccaaattccacagaaataacccagtaagggcagctcttgagtataccttttcctttgagtcttaattttcactcaaggcgaaataacccctcctctgaaagttctccacgttttccaagcggacagcatcaagttcgcaggggatctgtatcagtctcagcaggtggacttcacaaggggcgggttgggggaacgcccgcctgaccgtgtccggcgtggcggggggttgggggcgagaagagtgggggttgctatgtagggcgcccggaccaaataacacgccgcgatttcacactccagcctagctcagttatgtagccaaatgtttttctgtcaccacatatccacgactttggctgtgttgaggacgaaaacagagaaaagacactgatcccagaacactgcgcctgggaggacgcagggcgcaggctttgtagtctctgagaatcgccctgcgtaaaagtgtcctgaggtcccgcttctgcgcccttcccggcccaagccgaacacagggtcaacctcactctacaaagtcaaccggatagaaatccgccaccccgcgaggagccccttcctactgtctccaaggggtccccgacactgctctgagcgaccctaagatacctgggtgtctctgctgggcacaaacctctctggcgccacttccaccatccaacctctcccgcggccctcccttccctttctccaaccaccctctccaccccgcgccgctcccatctcgcccccggccccgccagcctcacccagccaaacccgagcggtggaacgctgcgctgggtaaacgccgcgcgtcgggtcctccctcgcgcggctccgggcagcgttccgtggccaccgcgctcccggtaacagcagaaaggggagggaggagagctaccgaggaggggacagcgacgccccgacgccgccacgccccccgcctcccacacgggggccaccgtagctctctagaagctcctcagggaagcaaagcgccgttcccgccgcaggcaccgagacgtcgcccagatggaagaaactctggagatgcgcgctcctacaccggtgccgcggcgcccgggcccagcaccacgcacctatgcgcgcctctgccggtcctcctagaaatcccgccctgcctacccgcggcgcgagacgcaacgacgctttcaggggtcaaagacctggcagaaatgacttcccaaccccagatgcccccagcagcagtatttagcagtcatacaattgcctgaaatgaagaatgagtaatctggatgagtcggccctgaaatcgacctgcaacttacccggaacgtgagctgtctctctctgacctctgctggctgcttcacctggagtctgagtccgactcatgtagcacttcactgtccgcgttagtttagccttcactgtcagcaactcgtcaccttgtcctcttgcagcgaaggtttggaatcccatcacgggtgtgcagtggttagtcctgagatcatggtggtgctaggagaacctgccaaccaatacagaaagttgtcacgaatagaaacctaagctctggccgggtgcggtggttcaagcctgtgatcccagcacctactttgggaggccaagtcggatggatcacttgaggttaggagttcgagaccagcctggccaacatggtgaaagcctgtctctactaaaaatata

SEQ ID NO: 32 - DNA, 2668 bp, Homo Sapiens
agtatggcaaaagagaaatagctaaggagctggggatgttcagtctggaggagaaacaaccgaataagctgtgattatgtgaaggctatgcctgcaaacaagataagcattctatctattctctaaggtgctggggagcataagaacaaaataaagcaggagacaatatttcttaatataagaacttcttaacagaattgttcagtggtggagtggattgcctcgtaaaacaagaatactcaagtatcaactggataatctggccaagatattcattctgttaaacgactagcccactgcaaggctgctggacatatttatccagcctcaaatgggaggaggggtggggtggtagataattgctaaggctcttttttcagcccgagactatgaatctatctgaattcttaagatcaactgccacaatgcacaatgcctctttatagcaatccatattaataacaggccatttcctctttccacccaggcaaacccaacccaggagctttccatctttttatcaggccctttacagagtaaactcccttctcagcagagcagcagggccctgggttccacggtctgcagcaacacttgactccacaatccttagctgtttcttttagaaagatgtaccctcctagggtcaggtcagaaatgagcattttccttatctccgtggtagcaccatccaggactggcaacccatcctgtgacccaggacatgcccaagaaccagaagaaagcaatccatcaagtcccgggtctcgaattccagtgctaggggcgacgcggaacccttaccttctaccgaaggggagaaaatgatgagattgtcatagaggaattccccatactttatgagagacaggctggggtcatcagcggtcttgaatgtgagctcaaagccccggtctggacaagaaaaaacaggtagttgaggaagacgggacgcgaagggaaacccctgctgcagacatcgcggacccgcacgccaagcggcaggccagacccgggcggcctgctccaggaaagggagagggaaggagagtggtcaatgccctcgatgctgtaccaaccccaggcccccacacgctaccccctcggaccccgctctcacccttcaggctccggaagaaaagcgaatgagtctcccgcacgttgaggttgtccagcagcactaaggtgcggggtccgctggcgcaaaccgcgccaagcaagggcagcagcaaccaaaagagggcccaagcccgggccgcggtgctgggctccatcttcctcctcctgccgaaggacccagcacgtgcacaccggaagtaccccatctacggtagcccaatcgcggctcgtgcccgtggagcactacccggaagtgatcgggatacgccgcggctgggcgtccagagccgcagctttggcgataaggcgcggagagcgccgccggaagtgccctggtgggaggtggattccttgaaccctattggtgggagtgaatcaaggccccgtccccctaaagaaaaggctcaatcctagagagacagctctgcagccgcggccaatcaacgaggccgagcgccctttgctccgcccaggccggcctcccgccccctagtctggagcccacttccctctggagcttgcggggtcctccccgggcttgaccgtcgcgtcctggacagggtgtttggccaccttcttgctggcggggtcttcactgggcctgggaaggctcgggaccaggaactaggccccacctccaccatttctagggaggaggagttggaagaataagatcagggtcagggcacttggagcctccttcctgccgctcacggctccaggggccatggcatggacgggcctgtgctgcccagctcggtggcccacgctggagactgtggatgggcagtagactggcctagcgatggttccatttccaagttgcatctctcactagccgttacccgggcattgcacttctctccaggacagtttccctggctgtaaataggactaaggacgaggtccagctccgctgtttatctgtgtgccttaggaacagccatttaattacctcatctctgggctcttgggaggaacatggcaggttttgaagcacttagcgccgggctagagtgaacatccattcaataatgtggctcccacctcttctaggttaatacagaggccacccggttcatctcagacctgcctttgtccaccaggggtttaagtaaaaactaccacaagcagcaagacttccaccgtcctctgggtcccaaccacaatcctgaggccaatggtgacggcaactgtagagacagaaggtagcagttcctttcggacacttgtccaccaacccaagaatggagcaaaaatcaaaacctccctccatacatcttcttaacggactctacttcctctccattcccactggctctgccccaagttaagcctctgcagagctcctggctcctgcaccctaactcctgcccttccaccctcgacacacagtaccacatccgcccgcctctaattcagagccaacagtgttaaactgttaagagtcggccacggcacagggacaccccaaggctctttgctctcaggtctccacctacactcatctcagcagcctcgtcccctctcagtccttgctcagggcttc

SEQ ID NO: 33 - DNA, 2182 bp, Homo Sapiens
taatacgaccagcacaagtagcctttgtctccccgccctgatttgagcatccgagggccccccgaggcagcctgcacgggtaccccggggtttgcgcactgagtgaacccccagattcggccgtgtcccagccgtccttgctctgaatcccccacctcctcccggccgtttggacggttccctcggggcgtctgtgcctccgtggggtacccctaagacacccagcatgaaaccccagcaccgactgcaaattccaccgaaagcagagtcatccgtttttgccctcggcaaacaactcaacttcaagcctcgagtccttgcaaacccacgctggctgggctaactccgcttcccttctccttcccccgactcctgcaacagctcagagagcctggctctgacgtagttcaaaataacgtgcgccagcctcgctgcccggctgaccacagcaacgagagccacaagccctcgacgctgcttcgataacatgaagcaatcactcataaaaatagcaacccacgtagcctggccatatatggagctggcgagggtggacggggatgcccctacggaccctcttcggagaaaacaaatcgccgctgaaatttcccccacccctcccatcactaccttttacccctcctctgccttcccctctccttagatgactcaaccacagattccactgaaagggggtgggggtgggggtgggggggaatatatacacatacacacaaattatacatatattatacatgtattataaaatatacacacacatacatatatacatacacacacatatacacatatgtacacacacacgcacacacaccaaagaacatcaggaatgcagttgcgggatgaacgcgtttgcccaagaccgagtgttaaaatggagtcataagagtcgccccgtgcgggtgtttatagaaggtgaaaacacgcaggtttgcaggccagcgcactgggaaccgagtcaagcgcgccgcagcccgggccccgcccccgcccccgccgtgccccgcccccacttcctcccgcccctcgctgggcggctattaaaagctgctgacgtcaaaacggacggccatctttgatgagggcagagctcacgttgcattgaagacgaaacctcggggaggtcaggcgctgtctttccttccctccctgctcggcggctccaccacagttgcaacctgcagaggcccggagaacacaaccctcccgagaagcccaggtaagaacccccctccccaggtcgtggctctggctcgggatggctgcatacccagaagggacagcagctgggcagtccgagtgggcttgggtaaatacaagtattggtgcacttagggtgcggtattccgtgtgtgcacgtctggtgggggctttataaagtgttttcgaggtgagctgctggggaaaagggaaacgggagccctgcaaatggagcgacggggaggaagagcgagggtacgtaccgaataataacttactcttttgaaacagtagtgggaccccctctttcttccattttgcgatgcagttttcagagatatttaggctgttgagttttcctcccctgtcgttctaaccctattattatgactgttgtcgttagggtgctattatccagggaagaattaagggggagacagggtgtgggtgctggggaggcgaaaggagaaagggggagttcccgccccgggcaagctgagctgctgcagcgacagcagcctccatgccccgcggacttgatttatgccgcctgctccacgtcaactgcaggctggcgggaggcgggcgggtcgtgccgggtgggagggctctgcggagggctggcgcgggtgggctggcttcggggactgcggcggcccgcgctcagcaccctggatagcaacaccgagggctcgcgcgggcgccctcgacctttcagcaccggggacagcggtccggccgcagcgcctcatctgcctgcggcagaaatgcctggccggggctggatgtgccagggctggagaccaaattgtctccctgagaccccggtcttacggagacccttaatagaggagtcatagtagcttaaaagaaaacaagaaagaaataaatcttcctcacagagactcctttgcagacaatttcctgttcccctcctcacctcctgcatagcttcaacaaa

SEQ ID NO: 34 - DNA, 2712 bp, Homo Sapiens
caatgaaagcgtttaatacaaaacgaaattaaatattttttgcacaggttccatacaagtaaatccgaaaaaaagtgtgtgtgggggggtccacaccactaattattatggcgaggaagataaagaagacatggacagaaggcggatggctctgcggcctggctcccgcagaccgaccgccttcttcttccattcgagatggctcgtaccgaacctccttgccttcttcctgggtctctcgggggctggaccaatacatctgccgatgccctggccgaatggcaggcgacatcgggtcctggacccccacacgcagctcagtacccacgaggccccaggccgctggaagcctgtagctccgcggacgatgaaagcctgcccgcaggttctcctggagtggtgagcctctgtcggaagggggcgcccacgtctttttaatggtcctaacacaccagtggaataaatctctaagattccacatcttttgtttgctctgaatttattgcgagtgaaaaacagagaaaatcctcaagtttaagtttctgatagcagagtgtgggagttagagcatggggagtccagaggttccagacccccaaaggtctctaccagggccatctccgttagtggcggtggcagcccctcttgtggcctttttcctctctccaaggggtcaccccgcaccatgccgctccccctcatctatcttgccccctccccacaggcccatctgcgctgaactctcgccagttccgaagtcggcgagggagggggtttacttgcccgatcgttggtgggtttgagcttatagaggcagaggagtaagaacctgcgatattgaaagctacccacatggggcttccttgaaggaggacgtggaaggcagaaagtgacctgctctgagcggcgcatgtaaccgaggaccttaagctggaccacggggcttggacgattttttaaatcaggaaatcgacctcatcttcctcctcctcgtcctcttcccctgaacccccagtccgcatgcactcacactctttggccttttccctcagtcccgggctcctctttggtaaatagatttgtaggtgtctaagtcacgtcccaccctcactccttcccaggagaggagacagggctaggatcccacccgaccgcgggccataaacacttggctgcggcggccgccgcggggtttctaggagagctggctccgggagggaaatgtcctcgaggtagtggcggccgcggcccaccaccaactgctcgccaccgaccccactactcgccaccgacccgctgctcggagcttcggttctgcgggttgtccagacttcaggcctgtgcgctcaatcgtggagaatgcgccggcaggccccccacccccagcctaaggtgcaggaaggaccagcacgaacccgctggctttgctgcgcggccaggagatgagtcccaccgggcactgagcccaggtacaggacatcagagaatgaacacagaggcagaggccctcatgtccctctcagagtcccggctctgcaaagagcccgtctgtctccagcttccagaattccgcactgtgaatctgtctacgtggactgggaaaacagggttggcaccactctgccactccgtttgtgcctgggaagggctaagtatgcaaggctacaaacatctacttcactgggatcccaaatgctcaacaaaccatgacctgctttggtcagaaccaccagaaatattaagggaagactcagagagtttgggggaggaaattaatggtgaattacccaggcactttctcaaatctctttttctctggaaggaaggactgactaggggcagcctgctggcttcattttcacacgacagaaaaatcatcgtattaaggatgggtgcttccaagaccagtgggtacaccctatggggtggacaaggagggaggaagagacagcctctacaattgtccacctacccagctgtcagctgagaaaaatgctaaacggacatcacagccacacaacgaatctgcccgttcccctctcctcagtcttcctgctgttaccagggtgagaggtgtaatggaagggggtctgagagaaagcttccctgcaaagggatcgccttccaaatttattcataattagctcaattcatgaaagcggtttctaaagtgctctacagagctctagatagaaaatatgaggctaacgatcatggcagctagtactggttatcgtgattattgccactgtcaggatgaatgattatgactgggccaggttctttgggaaccctggtggagtgggctgtcacatggggttccgtctccctgcacatactgggtacccaggccgctcctgaggaacagtccagcagccagtggcctgggaagggtgttgtctctaggggcctctcagcagagtccttggccccagcctgggcttggcaggttcctggtctccccaggacacccccactttcgctcctcccacccaggcaaggagatctcttaaggggtagcgctgttcttcaccttggcgagaaccttcttctctttgacccggcggttctgaaaccagatggtaatctggcgctccgagaggctggtggctgccgagatcttgcgcctcttgtccttggtgatgaacttgttagccgcatactcccgctccagctcccgcaactgccccttgctgtacggaatgcgtttct

SEQ ID NO: 35 - DNA, 2207 bp, Homo Sapiens
agattatcgcagtaggctctgtaccaacctactgcaaaaaataattttaactgtgatggtatcctaatggccacatacaaaatcactcctgaaatgtattttatgatggctgtccagggggaaatacactagccagcagacatggctaatgttattcctacttaatttaagaagcaacaatagaactaatgaaaacagacttacaccccaaagaaacaaacataacaaactgaaaaagaaggacaaaagagactattggaaatataagaaaccattagattgaatttacccagcttgtttaatccctttattttttaggaaaaaatttctgaaatttgtttccttggaaatatactatacaactcaattataaggaaagtgatgttttaattataaattgttgtcatgaatagtgcaaatcctaaatctgttaataaacttattttaaaccaaattcaagcctataattcagtaataatcttgtcaattcatttgtaaaattactattccaaagcgattgccttaagctaagctaaaaaacaggttcatctatggcaagtggttagatcctgtggatttatttatttttacttgcgaattaatacagtagccctgtaatactgatctacattaggaaattatataactagtggagcctgaattgacaaacaaaaacttggatatcgctacagataggatatgtagaagctgtctaactggcctgatctattctctgggctgatatttcagtaatgcctttattctctaataatggtgagtcccccagcacatgctgctatatagattaacctaatttcaaaggcggggacttgattccttttgttcatcaagagtttgcccgcctgcaagaccccagcgcctttgtagtccccaccctccttcactgctctcaacttctccccaggctccttggattcgcacctcccaggcgactgtttgttagtttggggtgtgtgtgtgtgtgtgtgtgcccatgtgtgcacgcgcgcgcgacaggggcggtacctatccctccaggtatgcaaggtccactcaccttgacctgactctctgtcatccccaacgaataggccaaacgagccctctcgggccccgccaagtattttgtttgttcgaaagtcttctccagggcgaagatctgctgtccggaaaaagtgggtctcgtgtgttttctcttcccgtctttgtccaacaaaatggatccttgatctgtgagaaccaataaacaacgagagagggggaaaaacaatcggttacaagcggctgcactagggggaaaaaacgaactcgaaaaacaatgttttgtggggaaagaaagctcagtctgtggcggacaccagaagtgtagtggcgcttccagactaacggcacgtctccctttgcttttttacatccacctgttttttaaaagccgcgtgtttggcgcagcagtaaataccttctgctcaacaccgacgtcaaacagctagggagcctattgctaaagtttgccagagcctaatcgcaaggccccattaaattaacgactgccagaaaaaggccactctcgcctcctaatccagtcggtgctcgttcggccccggagcctttaagtgagaataactagatttttttttttttccttcaacgcttccctaacctgtgtccaggcaacaaaggggtccttgtttttgcacacaagagagctaaatcgcccccaagtctaacgtcgctgcagccgagggggagaggggaagggggagggggcacagcctttgttggcggcccctaatacggccatcaaaaccgatacaatagcgtctccctggcacccccaccaggcccggctgccacagtccccgggcttcccaagagaacctccacttggctttcgcaacttcccgcagttactgccgctcagccgcactaaggaggtccggagacttggaagaaacttcggagactcgctgaaaggcgaagaactgagcgagaaaaggaccccaggctgggccctgaagtccacctggaaggctgggagcctccgcggcgctgcggcctactaccccgaagactagcgtgatcttggggcaactcagtttgcctcaagcaaggtctttgcgggatggtacattttccccaggccgtgtcccttcatctcactcttctcctggctcgctcttgtgttagggtgttgagctccacgatgt

SEQ ID NO: 36 - DNA, 2460 bp, Homo Sapiens
tcggaaaggccttgcaccagaggccaaagcatctggccccagcaaatgaccaagtgtttgaaacagccagtcttgtgctccagagaaacacctcacataccctaaggttagtggggatttaacccgagcataaaccagtaggattaaatcatgacatacacacagagaacacctttttttttaaactagattctttgatcccatagaactacccaactcttcttgtccctaccatgacttgtgggtatctgaccctactgttcatggaattttagattttcctgcttgaaagggaagggacggccaggcgcagtggctcatgactataatcccagcactttgggaggccgaggcaggtagttcacctaaggtcaggagttccagaccagcctggccaacatagtgaaaccccatctctactaataatacaaaaaattagtcaggcatggtggcaggcacccgaaatcccagctacttgggaggctgaggcaggggaatcgcttgaacccgggaggcggaggttgcagtgagccgagattgcgccactgcactccagcctgggcaacaaaagcgaaactccgtctcaaaaaaaaaaagaagaaagaaaagaaaagaaaagaaaaaaagaaagggaagggactttctctgtctaaatgtcactcctgggtcaggctgctgtgtcctcttttcccaacgctggtgattagaaacttcttgcttctctgccatggtggtgggcatggtgatgtggggtacagctgggagcctcaggtccacacgggagatttaagattgcaccctctcaggaacaaagccagagcccccgtccaaacccctacacctagctcaggccctgacccgtagaaggttctccataaatgtctgctgaactgccctgcgttgctgggtcacgcgaggaaaatggaattaagagtccgctgacccggagggctggttccggcgcactattgactggctccagggccttgagccggggatttaacctctcggcttctcgatttcctcgctggcaaaatgaatctgataccgccctgaccgcccttgcttagcaggggtgagtctcactagaggctgaaggcgtgagaaaggcacagagcgctgtccaggcagggagccactcgggctgccacctcccgcgcccgctggagaccgtaagccaggagagctggctcagccgtcagcaattacctgcgccccgaacacaacacctgcgctccacttccgcacaggcagatggtgcaatctggccgcgccgcaccctcccgcaccccacccgcggcggccttgccgtgacagcgctcgcgccaggtgtcggtgtgcaggctggtccgggacgctgcgactgcagccggcaggaacccgcgcgaggggaaaggggcgctgggaccaggccatgggatgcccaaggcacccctctcaagtccaagggaataaggccagcttctcctggattcttaaaacccctctgaaaggagagcagggagcaggtatcagctccctgcgttccacgtggagagactggggctcagagagacgaggtggcctgaggatggacacacacatattaagtgatgggggcggagggaagcccaagtctctaactccgggtccaccattcctccccgggctggcactgctctgactgcacagaccagctgactcgtcttgggcaagggtggaattcttccttttgcccagggctggctttgcctccttccaccccgtggccttgccactcctgtgccacccagcctcctcccaaacaccacgcccatctcacataccctaaggttagtggggatctgagccaagcataaacctgtaggattaaatcatgacatacacacaaagaacacttttttttccttttttttttttttttttgagacggagtctcgctctgtcgcccaggctggagtgcagtggcgcgatctcggctcactgcaggctacgcctcccggattcacgccattctcctgcctcagcctcccgagtagctgggactgcaggcgcctgccaccacgcccggctaattttttgtatttttagtagagacggcgtttcactgtgttagccaggatggtccccatctcctgacctagtgatctgcccccctcggcctcccaaagtgctgggattacaggcatgagccatcgcgcccggcaaaagaacacctttttttaaaagtagattcttcagttccattgaactacccaactcttcttgttccccaagaatcgtggggagctgaccctactgctcatggaattttaggttctcctgcttgaaagggaagggacttctgctgtctaaatgtcacccgagtcaagctgctatgtcctctttgcagcctgtaatcacctatgctggcaattagaaactccttgcttctctttcactgaaatccatcagtctcctgaaggacccagtcgtccctat

SEQ ID NO: 37 - DNA, 2493 bp, Homo Sapiens
ttctccatccaccaaaatgttagctctctctgggcactaggagctggcggttacctgcttggtattggagggggtgggggtatggcccttggcgacgcacaggatcacagcagtcagtgcacaggttaatatttcagcggaggagatccatgcaacacttcattgtccttttaggagatttcaggttaaggaccagcacttaagagtatgaactttgcctggtactaatcagaactgtgttgaggaggttgccttccaggccccaatgagatgatgtttgcccagataattaccagggccccttttctgaaatacaggctttccctgggggctggaggttctgctagcacttcatgaccctggaggtgtggaggctcttctgggggcggggggggtactgcgagtggtgcgtgcattgagccttgcctgcctcagacctcggcacctctgtcatctccctcaagagtagagtttaggaacagagaggtatttttaaaaaggaaacaaggagagtcatgtgccagcagccaggctctgcgagggctggaggacagggcccacggtgctccttgcccgggtgagggttttatgcaccagaagctgcccaggggattggtggcatctccttgtcctgggcttccttctcctattgaaagtaaggaggttggaccgtgtggccaccgaggccacttctggttagaatatgctagaatttccatgcagcagtgcacctgcaggaagctgtcttaagtcagagaatactggggcgtcattgttttcccagcgttgctttcctgtcttcagcttgtccttagccaaatgaaatgggatggctggttactgaccctagtgcaaagaatggggtctgatctctgccttgggtatttgatgatgtgtttgcggcaaacaggataagctattacaggccaacaggaatagggtgctggaagccatagagtcccacatggtagaaggggtacgcacagggcttctcccccattaactagtggtgtgccttcagggaacatgagaaggaggtgcagaaccggaagagaggcaagaggccgagaggccggccaaggaagctcactgccatgtcctcctgcagccggcgctccaagctcaaggtgggtggctgcgctgggtatgctgaccccacctcccagcacccccttggcgtagggggcaggcagagggagggtttggggccctcaggaagggggtggcacttctgccaacagtctgtccctctactcggaaaacaggagccccctttcttcctgtctctcagcttctgctgccaggggccccagccggctgagagttcctccccgcccctcccaggggcttcctgcttcagcctgtcctgcacgcctctctgctgggtggcagggtcaaactgctgcagacaagcactcttccctcccagggggtccttgggggacggaaaggaacaggaagcatgcgtacagtaggtgctcataggattgccggctggatgtgactcaaaagcctaagatttgggggctactccgggcccacctgcgggtgcaccttaaatcgaggtggccacgaaaggcagggctgactgaatagccagggggtgccaggaggggccttggaggagggcagaggcagtgtgggctgatgatgtgctttggccttctcgggactgtcctgtcacccctcctcgctacagtgatgggctcaccccgccacaggtatgcatgcgcccctggggtccgtggtagggcccctccctcccctgaggacaggtgaggcaggacaggatgggggaggagggcctggcctcagtcccgggtgtggctttgattccctcctccgggcactgtccctggaccttcgcgtgttgtggccacgagctcagtcactaactgaacctgcctttccaggaggatttcctgaatgaacaggattccctgctgtagaatcttgttggctggtctacactggccttacgttatcttgaaaatcttccttttgagcaggattgtgggggctgcaggagttctgctgactgaggagtggccacaaggcagtgattgatgccttgtttgaggaggtttgaggagatcactcctgttgaagttgggagaacggggtggtagggaggcggtgttggatctgactcctaaagcacacgctgtagaattctgacccagcaggcagcatggcggcctgtaaaacacaaggacactcttatttaacattggcggtgacatccagaaggcgaggaagacagtggtttatttacctgtatcctggaaggctcagactgggaaatggggatactgaagcccacttggtgtaggctgcaaagctgtgcatgctacttaatacgacttgtaacctcctgagtcctgaaaactgtgatgctctggatacagttccctttgaacgtctgctctacagcccggagctaaatctgcatcccccttgaaagctgatggtggacggggatgtcatggtgtg

SEQ ID NO: 38 - DNA, 2358 bp, Homo Sapiens
tgatcccttcacatccacggattcccccagcgccccccaccccagggaactcctgctaatcaaccaagctgaaacctggaaaaaatcaagccaagtggcgtttctaataaacggagactatgtgagaaggtttaattccaagcgggggagggtatagaaatcaataattggcctttaattaacaaacatacccaggtatgctcgcaaacgtctgcacatcctgtaagattaaattacatacaaatttgtgctctcaggtttattacgtcgtaattaattattaaatcactatgcctgtctctactgactgttttaaaaactgagaatgcataagaacaatttggatttttctttgttaaaacgcagagttctgttctattttttgagggggaacaaaattttctcttttcttcctaaaaagtcctgggggtacagaaaaataccgtctcactccgaagcaaacctaatattattcaaaccgatgaaccccaaactgctgcgtcttgactggcatgcatattgcacatgggtttttgataactaagaagcgtcaaaacagagggagggaaaaaaatagcggaagaagcaagccgctgagtgtcccggccgggattcccgatgccaggcgcgttcggcagcagtgcttgagggcgaaacgggcctcaaagtgactcagcggaggcaggaaatccactctttgctaccccttggactttgtgttttgttcctttagtttgtggggggcggagaggtggttcaggtggcgacgcttggccacctatattggcacttttcacagctatttaaagaaggccttgtcccccagcaacaacactcttgcccttgtccccccagtaccaacactcttgcgctccccatttcccggctgcactcttctcattctccccttccgagaggcccggccaccggctcgggagctgggccggtcgctttgggagcggatgaggaaggttaggagaagcagcgagatagatcccaattttacaattctattttctttcggtagggtctcggcgtcctgggccacgttgagagcgaacgtgggccgagcggaggacacagagtaaaaagcgacgcccgctgtatacataaatccgcacccgctgcccgcccgggtactgcctgctctggcttccgctctcttccgaggctgggcaagtccaaaagttcccgaaaggggggttcaaagaggggcgctcagtgcacgtgatttcgtttcatctagggtgttgggggtggggagattcctcactggatttggtttctccagcagaactgtctcatcctccacattcatgccgctctagcggttccgagtgaaagaggcaagaggtttaaaggacagaaggaaaactccctcctgctaaaaataaataaataaaataaaataaaataaaatacgggcttcccaaacttgaaaagctccaagggcagagtgggtgggggagccgtaaccagaatctctggcttcagctctgcaagacccgtgtgtggacactcttccggggtccttgactcgctgctcctcctctgtcgctgcaaaggagttgtgaggggggacccacaggacccgacatccagctccagttaattaacgcggagcctagggcccagccgcgcggtctaatccccgcgctgcgttgcctactggcccagaaaagtctctctcggccttgcccatggctgaaattggggctggagttggtgggggagagaagcctcctcgaacttgggcgctccaggcctcgggtctcggatgctattgcctctaggccgcgagaagagggcggcatttatgagacgtcgatcagctccgagattaaaaatccagccctgggtatttttaatcacttgccactcagacgcctacgaacaagctcgcccgcccctcgcggctttggggaattcggtgcccagtgcgtgaggcctggggcggcttgttggatttatttgggtagggacgacccacaagcactgacggacagatagtgatggggctcaatttagtgtatgaagaggggcgctagcttccctatcgcggaccaggtcccagagagcggggctccagagctcagcgccaagcggaaagagagtgcgcccaggacgcacggcctgaacactcacccagcagcgaggagaaggaggccgaggtgtcgatcgcgctttggaagttctcctccatctttaggccgtccagcatgttcgggccgggccgggaggacctgtagaggagaagaaacgatgcgtctgacgtccgtgcccgctgggactcggcgccagcagccaccgcactcctgggaaagaactgagggagtgtccagggcgaccagaatcagc

SEQ ID NO: 39 - DNA, 2802 bp, Homo Sapiens
cccgtacccttacccgccccgccacctccttgctaccccactcttgaaaccacagctgttggcagggtccccagctcatgccagcctcatctcctttcttgctagcccccaaagggcctccaggcaacatggggggcccagtcagagagccggcactctcagttgccctctggttgagttggggggcagctctgggggccgtggcttgtgccatggctctgctgacccaacaaacagagctgcagagcctcaggagagaggtgagccggctgcaggggacaggaggcccctcccagaatggggaagggtatccctggcagagtctcccggagcaggtgagtgaggggaggagggtgtctgggagaggatggttagcatggggggtctctgggcctcctggtctgcaaagtttcaagggggtgcaagagagggtctccggtttggaagtcaggggcgcggccattccaggaaaggaaactgttaaaggttaatgcttctcatacctaacaaatcctggagggcagccagcaccaacactcagggtgctgggaaaaggtgcgtgagagatctgaggcatctcgggggcaggggagggctgggaaggcaggctggctgggaccctcgcatcttaacctaaccttgaccctctttccatgagcagagttccgatgccctggaagcctgggagaatggggagagatcccggaaaaggagagcagtgctcacccaaaaacagaagagtgaggcttccagggtgcagcaggggtgggaggtgatcaagcagcgtggggattgtaagcccgagtcagggtgagggtggaggctgccaacagcacaacgggggaaagtggatgcggctgagattccctccttctctcctcagagcagcactctgtcctgcacctggttcccattaacgccacctccaagggtgagcactattttaaataatggctttggggaggggcaataaccaggaactcgggctggcacttgggctcaaggggtccttataggtgaaagggaaagaaccaaaaagcacctgagagtgccaagaagtcctgaccgacacactctcacctccagatgactccgatgtgacagaggtgatgtggcaaccagctcttaggcgtgggagaggcctacaggcccaaggatatggtgtccgaatccaggatgctggagtttatctgctgtatagccaggtaaccccagccacactctgagcttcacagagggcctctttggccccctactgagggttcctgacccctctattcataccaaacccagcagacccttctttcttccctcgttagcgctcctgaggcctcccagaactgagccaggccatcctgttttcttcaacatctcccttccctgccaggtcctgtttcaagacgtgactttcaccatgggtcaggtggtgtctcgagaaggccaaggaaggcaggagactctattccgatgtataagaagtatgccctcccacccggaccgggcctacaacagctgctatagcgcaggtgagagccgtgtgggcagccgaaagcaggacgtctctgaccgggggtagcagtgcagggagctaccgctaggagggaggttggaaacctaaacagaggcgggtctgaggagtgaagtgcagaatgccgggtccttacaggaggcagaggaacggtggagctggagaaggcagggggaaacagggcatctggatggctgtgcttcactgcgaatctactttctctcttttctcaggtgtcttccatttacaccaaggggatattctgagtgtcataattccccgggcaagggcgaaacttaacctctctccacatggaaccttcctggggtttgtgaaactgtgattgtgttataaaaagtggctcccagcttggaagaccagggtgggtacatactggagacagccaagagctgagtatataaaggagagggaatgtgcaggaacagaggcgtcttcctgggtttggctccccgttcctcacttttcccttttcattcccaccccctagactttgattttacggatatcttgcttctgttccccatggagctccgaattcttgcgtgtgtgtagatgaggggcgggggacgggcgccaggcattgtccagacctggtcggggcccactggaagcatccagaacagcaccaccatctagcggccgctcgagggaagcacccgccggttggccgaagtccacgaagccgccctctgctagggaaaacccctggttctccatgccacacctctctccaggtgccctctgcctcttcaccccacaagaagccttatcctacgtccttctctccatctatcggaccccagtttccatcactatctccagagatgtagctattatgcgcccgtctacagggggtgcccgacgatgacggtgccttcgcagtcaaattactcttcgggtcccaaggtttggctttcacgcgctccattgccccggcgtggcaggccattccaagcccttccgggctggaactggtgtcggaggagcctcgggtgtatcgtacgccctggtgttggtgttgcctcactcctctgagctcttctttctgatcaagccctgcttaaagttaaataaaatagaatgaatgataccccggctccatttcccccactgcctcgcctcagcccggtcctcgtacggggatctcccgccctcctggctctcctgtggcgcgccccccgccggatcaaggtactggggatgccgctagggtcaggcccgcgagcgcggagaagacagagcgcggcgcaaaa

SEQ ID NO: 40 - DNA, 2301 bp, Homo Sapiens
cacaacaaagaaatcagaatatctgggagtaaaacccagatttgggaaccatttagggaaagtctgcctcgatctgtagcagagttttgggattgactttctaaactgcagccactcctcatctttggccttgtgaaaaacttgagaccccggctttatcagtcccccttttgaaaaacagggcgtgtctcagccctaggtatgcaaagctaaacgtctcaaaccgctctgcattcgaattagccaacttaagaacaagtccaacagcactgctaagcaagagcctaataactcagcgtttcgcgacatctcttggcggcgttgaccgtttgcccgggacactggtttagaagcacggcatagggtgtctctacatcttagaaatcaagacagcctctaggttagaataaagtttactctggactgggcataactccactccacctctgcgattcttcttctcgtttcccgtcttctgtcttttctttcctcccttcccaactcctagcgcgctactttaacgtctcagtctcgttcgctaagcccatgcgcctgggacttgttctttgaatctcaagtccgaaaagccaggaatcctcgatcatggacttcctcctgctaaattagagggagtgaaatttcgctctcctctccatcctacttccccatcccaaactcgctagattaagttcgctgaccaggcgcgcacccaatggcagcaccctctccaacattttccccaccagagaggcaagtgtcctacatttgtacgtaaaggtccctgagtggctaggtggagaggctcggatgtcttttcctggagcgggcctcggggagctgcagcagccccagcctcaggcaccacagccaagcgagcgcgccttgggctcgctgctctgcacgcagctggaggtctgggccgctgaccctctggccacgtagtcaacccgaggatgtgtgccccggggctcggccttgcctcgggtgagaaggctagtcaccattcagggtgcaggtgtcatggcctggaaatggcaatatctgagcaaacaggtgggcgtcgcttcccggcggtgcggtggccgctggctcgcagcgcgctccagctttcggcgccgccgccgcccctttgctctgcggactcagccagttcccgggtggcccagctgggtggctccgaggcctgcccccttgggctgcggcgggaggcggggactgcagtgccgagtgtagggcgccccagccgggctggcggttcacgctgcgctcgggcctctgccgggagggcgccctggcgccaaacccgggcgggcaggggggtggagagccgattgagtttattcccattcagaatttagaggctggtggagacagagagtctcctaaatggatgcaagtctcctgaaagtctgggccggaagcctcgaaactttctgccacgcaaagccccagctagtctccagggctcggtcctggttccctttgtgcaggcccggaagtgtccgcccggttttcccactgcctggaggggcccagggtcgcggatagactcggacaaggctccgtttactttcagtttgtcttagttgactaatggcgggactggttgtaatgcgtgctctgagattttctccaggatttgtcactttaattttgcaatatgaggtaaggccatgttttttaaagtggagacactctctttgcctttcctgccttcctaaaggaagcacatcctcttgatgtgcccgacgggacctgcagactccagactccactgctttttctcaaaaccacacacttgaaaagaatacacttcgattgctgttaaaacttgtcagatttccatgttttaatcgctggcaatgtcttaataatggaaccttaccacttttgcacgtgttgctgaaaagagagctctccagtaaaagtgccgtgcccatgagtctcttgaggctgtgcaaggttacttatcaaggatctcaaaatgacaggcaggctacctctggatttccaatcacatgttcaaaactcaaagattctcagtctggagaggtttggttttgttttggtttggttttaaaagctcattcctcccccccccccacccccaataacacagtacttaattgttttattaaattgttccaggctctggaaccctggggaggcactcttcaaatggtattgttttttctgtatttatgtcaacacaggaagttgcattagaaacttaagttgacaatttaataaggcctgatcaagtatatgaggtttttttaaaaaaattgacgtagcacatat

SEQ ID NO: 41 - DNA, 2328 bp, Homo Sapiens
ccccacctcgaacaaacctggtgtccctgaccctcgcccatctcccagacacgcggggatctggggctggagctgactttccgaggacatcacagccccagcacccgagcccagagccacgctgttttcccctctgatgcttcagggagcgcgcgagcagggagcggcgtgagtgcccgtctgtctgttgccgggcggaactgagcctgaaccccggcggctggagcgctggccaggagggggcgaatgccgaggtgcgggcagctcagcgggcgggaggctgggccgaggctcgcctccgcccgcagctcagccatgcaaaagtgctcttgcttcccgggaataaccaaatatctttgtttaaagtggtggcgtaaatggccagtcgctttgtggccacgctggatattagtagatgaggatcattctgcttcaattgggcgcctctcatccgacgagcaagaaactgcttaggaggaagagggtttcctgtctgcgcgttcccaggcttcaagtgtgggccccgcgccttgagggtccttgggcgcctggcgagggggagctgtgggctgcgctccccagcggaatcgggggtgtcccccgcgttgctccggccaggccggggcctgcagccgagtcgactaccgagtggagcactgaacggcgcggattttgagaccgactccggtttttgtccttggattttaaacgtttttatcattgtttttgttttgctttctccttagctgttttagtctcctctgcgcgccaggggctgggagggcggagcgctccccggccggccccggcaggtgcctccaagacacccgcgctggtcaaggagcttcttgaatttagtttttgttttcacattttctttcccctccttgtagagaaggagctcctgatcatgacgaacaggcagttttgagctacttaattcatccgggctccctttttttattaatagcaattacagtagagaaagttttatttatttttaaagatttcagccctctccttgaagagagctcttactccctcaatacaaagccaacttctataataacattcgcttttctcaccgcctaccttctttaccagggtaaagaaagctcaggacaccctccgccctcccacctgcgcccgcgtttttgtgcggtccccacggcagagctggggaggccaccctacgtttgcgcagggagacgcgctcgccgctggtgttgcgaaagaccagagcgaagcccggctccttgcccttccttcccaggggcttctctggggggcgctctcaggccccgacgaactgagcattgatcactgtggtggctaagcaaggaggggaggcgacgccgggcttaagcgaaccacagaggagaactggcaacgctgaatacagaccttgtctgcaggcgcgacctggccgggcctgagtcccgaatggggtctaattgcgaaggcggggtgggtttcccagtcacccagcttctttctctcactcgccattatttcatagttgtttgtaagtttaaggaacaccaagtgtagaatgttgtacatctcttccagtctcaacgccatttagaaatggagatcaatcttcacaaggtttttgtgagattcaagtaagatgaagcacatcaaaatgctttgaaagctttgaatgtttttcagctcagtgccagcactggagattgcggtagttattatcatgactatccccaccccctcttaggtcccaagacctgagtaaaaggaagagttgggtgaatcttccacagcccctaggtcctgtcttctcggccttcgtcccttggcagcttttcaacctctcagcaggccacaggcgcacgtggctggcagctccccggcctccggctctgacagtccgggggcaaccaggcctgcagttctcgaggaaacccccagccccccacgtctcgttctggaccaggaaccccctccccaacaaccgcgcagcaagtggcgactctgggagctgaactggagtggagctcgaagtggctggggcgggcaaagactcccgcttcactctgggacacaactgggacggcgcttcaacctctgcctgcaggcgtgcttctcgcgcgcaccagcaagctctctatccacctcgcctgggcctttgcagcgccctgccgcccaggctccagcgcctctactaccctagccccttctcaacacgcggctctgccttcttccccagtaccactgcactgccgaaaataagcccggagactaacgcaccttgtagggaagagaaggacatctgtatctccaagcttatccaagcaaaggcctcca

SEQ ID NO: 42 - DNA, 2362 bp, Homo Sapiens
tcagctcctggagaaagaattttacaaaggatgggaaacttcaaataagtgcaattcattttgggctgacccagtgccctggataatgtgttttgttcggttcgtgcttcagacatttcttgcaggatatcgtagtttggagatttcttcctcccgtaactgattttacatacctaggatcaccactctacggcagttgtgaacatattaagaggaagaaaacaagtggcctattgaattgcagtttcctcatctacatgtgcgtgaccttttttccttgtaagaaggaaaaaaacaaaacggttcttttggagagggccagggttctctaagtatgtcagggatcaaaagtgggaaactgggaaaatgcaacttcaacgtgttttgtcttttaacggaacttatgcttgtaaaacacatcagaagtacagtgtttggttctgcaagtcatttctgttgttgttttttccttgttacgtggaggccggggggactgggggctggaggaggtgttccctccaacatgactgggcgtgtaacacgtttgcatcaacttttcacagtcagacatgtgctttcgaacaaaggagcagtggagacaggcagagatgggggcttgacacagtttacagattttgtgcttcaacagtactttacaaatgacttgctcaattttaacgtccatcaccacaagagacattggagtaaaatgagaaaattggagctacttgaaccaatcttttttggggagtgggggggaggggaaccattaatttgaatacctgcatcataaatcaaatccagtaagcttgtctcctacaaatggacttgaagtatccactttcttcaaagatgaaggctggagacaaagcaatggattgaaatggaaagaaggatgccaagggtctgaaaacatacgggccttttacatcgatttttgtcatgttacagtaacacacttttttttctgagaaaactgtgtacgtcaaattttaaaaattaaacattgaaaggatgtgcaagtctaaaagggctcaacagggttagaatcctgattcgaacatatcaattcactctcaagcatcactttggtctaaaggcgaggaggaaggcaggcagtaaagggagaaaaagagggagatcattgaattactcaataaaagaggctacttaccatcccaacccattgtaagacatacacttctgacataagagaactccttagaggtcgaataaagcgtgtaagcacctttgagtaatgcacctgcccccggagagggggcccggaagcccaacgagggcttagcgaacagacctttgctaatctgtttatttccttgaactggagtcgggctgcgatgggctgcgattcccaggacgatacatttaattagaacaaaacagaaaaaaaaaatgttgtaaaagctcaccaaactgctgcacttgtgtctctgaatgtgggtggcatttcttttaaaaggcaaagtatggtctgtgaaggagaaaggggaaaggggaggtgggagtggggagaaggggtcgtacgtacagcctggcaagggaagccctggctgagaccccccggctaaggaagggtcctcagcggctccccagccagggctgcgacggagtagccatctgtccagagcgttctcttcccctctccacccccattccctccaagactcgctttcctgccggctgaaacccaccgtccgtgtccaaacctactctccagccgcctcttctctcgccccaccaggaaacagtgggcgaaccctgcaccccaactccttctgctcgagcaggggaaggaaacggggccccaacctcgccctgaaacgcgccgggctgaccccattatcacccgccagccagagaagggcgtggggggcccgcgtttcggacttaataaagagaagggggcgcttcctttaacgccctgccaaagcacaaggaaatctccttttctctcccggaagagacggtgccccattttaccccgacagaggggggaaccccaggagaaagcgcgggaccaacttcctctccctacaaggcagggaaaccaaaccttacccccgcaaaacaaggctgagaatcctccctcacgtcacctacctacgaaaagcgagaggacccctgccctttagcaaaaacacggggaagagtcttctctaaaaaaataggctggggttttcatcaaaagggctggagatgcatctcccccctccccaattcggccttctaggggatagctaaaaaacaccccccgccaaaaaatacaagtgctatagagcacccacccaaatgacccccaattacaaggatggagaagggacctgaatgaacccccaccttc

SEQ ID NO: 43 - DNA, 2568 bp, Homo Sapiens
gtcccccaggggctgatcgctgtgcactcagcagggaagctgaggcgggcggtgccacgctccaggtctagggtccacatacctgctgggccagctccttggtgggcagcacaaccagggcacggatgtggcagaccactctcgaaagcagggcctgagggggaaggagcgcctgcgtcagcaaggctgttacctgtcctctgcacacccgctgtagagaaaggggaccctcacacagacctgcaccacagggatgacgaaggccagtgtcttcccactgcctgttggggcagaaacacagaggtcgctaggccggtagccacctctgcccaccagaaacccacaggctgcgctctccaggagggcaggaatcacagctgcctggactggatgaggaaaggcgagagagaagtcgtgtttacgcctaggcctaggcctgccgcttccctgcctgtgacctctgggctgggctgctctgctggaggcctgggaaccgctccccagagggatggcaccaaggcccagaggaacgccagcctcaggagacccaagtgggaaccatgagcttgagagtgctgagaccacacttggcaccgatgtggcagggacgcctgacccacggccactcacagccttgtgtgtgggtgcccagggaggtgttccctcagctgcctgcccggggctggggcacctggaaagtaggacgagatgccgtgtgcccgcagctgcttctgcaggtcaggatggacgtcagggatgtcctcgataggaaccaggtcttcggtgacattccttctgacacagttaggctcagccagccaccttggcaggaaaggctggacctgccatcaaaaagaaagagaggccaggtgagcgctttccaggctctcgcgcagaagcccacggtggaaaaagctaggggagggaggctggggaaacctctgtcgtcttcagctccttctcagccccaggatgcgctttccatacagccttcagaagttaaacagtaaaagcagatgccactccctgagcaaactcactctgtagcctcccatcaacccacagtggcacccaccctcccgcagccaggaggtcctgtgacctggcgctcgcctgccccagccacgccggcgtccctgcctcgaggcctctgcctggcacccccaacccccaaccttgacctggcttcaagtctttgcatcccaactcaaagagaacctcctccacctgccctacctaaggtgcccgagcactctgtcaaacttctcgctttcttcacctgtctcgccggaaatctctttaccgaaaaccacacgtgctaagcaaaaacaccaacggtcaggagcttgcagaacggcctctgacttactcctgaggcggtgagcgcacagcaggaaaccccgcacgttcacgcaaacacatcttgcagaactggcgcggcgcggcgggaggacaggggcaagcctagcagaggaaacgggagctctgcacgtgcaggatccagacccctaggcgatgaaactgcagacctggcagcgaggcgcggctgtgacccgggaacattcgctgaacgaaatcttccggggcgaccgccgcacttaagaatccgcgcagcctaccctctcacgccgaccaccctcccgcccgccgaggctcaccttcggcgccttcctcttcccgaacccccccagcaccaggccggggaccaggggtccggccgcctcctccagggccggtccatctggggccgcctcggcgctggcgctggtgctgcgctcccccggcgcctcctcgctgctccctgcgctgggctcccctggcgcctcctcgctgctccctgcgctgggctcccctggcgcctcctcgttgctttctgcgaggcagacacccacccggcagcgcgtcagcaccgagtcgccggcgccccagagggagcccgctcgccccgcggcccacctgcgcccgcgtcctcgccgtccgccttccgtcgctttccctgcggcgcctccgggctccccggctccgcgtcgttcacccgccgccgccgccggggccgccgtcgcctcctggtcgccggctcggtcgatgcagccgcctcggtctgcgcgggctcccgctgctgctgccgttcgcgggcccggctctgcagccgctcgagcagcgcgcgggccctgccgtgcgccccggcctccgcgccctccggccccgccgcagctgccgcatcggggcccgggtaccgcgcgacgtagaacagcgccatggccagccgcacgcctgggactcgggcgtggcgcgctgcgatgacgtcggcggcacgcctgcgactcgggctccgcgcaaaagatggggttggggtacggcgcgtagagatgacgtcgggttctacgcgcagtggtgacgtcacgggagcgccggcggctgagaatccgcgttgttccgtgttgggggcggcatggagcgggagccgggcgccgcgggagttcgccgggctctgggccgccggctggaggcggtgctggcgagccgcagtgaggccaacgccgtgttcgacatcctggccgtgctgca

SEQ ID NO: 44 - DNA, 2631 bp, Homo Sapiens
  unsure (1..197): unknown base
nnnnnnnnnnnnnnnnnnnnnnnnnnnnnnnnnnnnnnnnnnnnnnnnnnnnnnnnnnnnnnnnnnnnnnnnnnnnnnnnnnnnnnnnnnnnnnnnnnnnnnnnnnnnnnnnnnnnnnnnnnnnnnnnnnnnnnnnnnnnnnnnnnnnnnnnnnnnnnnnnnnnnnnnnnnnnnnnnnnnnnnnnnnnnnnnnnnnngaattcttaaatctgcagtttttttgttttgttttgttttgttttgttttttgttttgagacagagtctcactctagtcacccaggttggggtgcagtagcactatctgggctcacacaacctccgcctcccgggttcaagcgattttcctgcctcagcctcccgagtagctgggattacaggcaggtgcctggctaatttttgtacttttagtagagatggggtttcgccatgttggccaggctggtcttgaactcctgacctcaagtgatctgcccgccttggcccgccaaagtgctgggattacaggcttcagccaccgtgccccgcctaaatctgcagttctgatggaatgttttgactgaagactgaacgtagaaacagtaccttgggttttgttgttgttattttttcctaacccggccccctattagtttactatgtattagaacctgagagaggtgactactctgccaataaattgccacattcaatattcttcggttgcctaattcagtgggaaacacagaaaaaaaggtaaagaggacatgaaatcaataataaatgcatcatctataccggattggaatgcctcttaacactcattcatctgagggctgagggcctgtggtagaagttcttaatcttgttttcagggttttgaaattgtgtaacttttttttctttaatgtaatgagcatgtgtatacacattttttttttccaggggaaaccctccataatttttaccagattgacaaccgttctagatcccccgacaggttacgaactacaatactagttttttttttttttttttaccggtttgtaaaaggatgcaattcttcgaatatagtttttgcatccacttgacgaggaaggagcctctaccctaaacaaaaatggcgggagctgcttcacacgtagtccctcacgcagaaagcctggaaggccccctccactttctctccaccttcgcactcctgaccccggaaggactccgccttctccatgtcagactgctgctcagcgccaggcatcagctgggaagctggcgtgggcaggccagctgtacctggcctggagctccaggtacagggccaggggcggggtggggtggagaggcgggcgggaggaagcggagagttgagcggccacgcagttggggcagaggcctcggggcaggggtggcgcggactccatcgctggcgttagctctcggagtgccaggtggagcggcggaaagccagagggtctacggccgtgccaccctgaacacccccgacctcgtctcatctcagaagctaagcagggtcgggcctggttagtacttgcataggaaagcaggagggtccccacgccagagggaggcctgcaaaggaagcgcggaattgggatgggctcgccactgctctgagccagaggaagggtctggacggccgagctggagggacccccttttctggtgttcttggcaaagaaaaaggaagacagcagaggagagctccgcgaggggctgctgtggggtcgggggagagcgcgctggaggtagggcagctggtgaggtctcaggttcggcttggatgcgggtggttttgagcagggagtggcttttggatgtgaaagattactctgctttgcaggtgctttaagagaataatttagcacgggagtattgtggtgtcaggtccttctgtaaagttgttaaattatctattttccagagggaagactcagcttgtttttgcacaggactttgaaacctttattattgttgttttattgttgttgttattgcagctaaacatgtttgctctgttcaaagtgtcagagttaggttatatagatttgtgcttcacgtcaattttctttttgatacttcagactttccttcctgttggattataaagtcaaagttgcaggatagaattttaagatgtctaagaaactgtttatgacacttatttttaattccccagtagttggaatgtagaggagcaagtaatatcacacaggacaatatttttggttatgttttatagattccgtctataaatttgaataatcatgaaacccccttcatgtttatttttattatgcttctgaaagcaaatgaaatgactagttttttgtttttttttctttagtttttcaatgaataatgattaggtttggaatcaacttcctcagtaatattaaatgaaaaagaatgaggtagttagaatgcaaaaatagaggtttgtcataatattttttcttttttcttttttttttttttttgaggcggagtctggctctgtcgcccaggctggagtgcaatggcgtgatctctgctcactgcaacctccgcccctagggttctagaagttctcctacctcagccttccgagtagctgggattacaggcgcccgacatcactcctggctaatttttt

SEQ ID NO: 45 - DNA, 2470 bp, Homo Sapiens
ggcaggagaattgtgtgagcccagaagtttgagaccagcctgggcaatatagccagaccccatctcaaaaacaattgtgcatttctaatactcactgagcccctgctatcccctggctcagtgtacattgctctatatctcctagcaaacccaggagctatgtatgaactgaaaccctggttaaatagcttggtcaaagtcacacagctcaggtgggggaggctgggtttaaaggcaggctgctgatgctatgatccatacttgaggctactgctggccacaggctccatctgaggccctgtagggggtgaggggagaaacccggccccagagacagggtctgaaccctctgctgccagccagtagagaaaacagtccctcacccacaacgtggggataacactgcctaccacaccaggcagtggaaagaattaaattaatttaaataaaggagacagtgcagagtacctgacacgcaataagcactcaatgagagctattattagaggtaactctccctgctttcagtctaatgccatgtttcttatcacttaaggtgatcaccttgttgctctttaaaatattatgtatggttttctctaagatacatgtaagtgtaaaatgcagaagaaaagcatgcggggacgggggcgggggggaagaaattccgttttctttattgatcagcctttcccccaaaatactttctcaaggaattattaaatactcaacatggcgctgcactacgttattttaatttaaaaaaaaaaacgcgtaccaaacaacgaagctcctgcccttgggagtttatacacaggctatgttaatatttgcaaagggccccgagtgtctaagcggctaatgaacgtcttgggtcggtttcctcaaaatccagcccattgtttccccggtgagcacgatccgaagccttatcccataacgcactgtagcccgaatctttctgccaacaaccgctgaaactaccagaggttaaagcaattaacatgagatgcaacctcaccgtggcgcagctccgcgcgcccccggctgctgcgacccgggaggggggagccccggagcggctgcgcccggccccgcacccccggcagagcaggttagctccccctgggtggcaagcctttgcaaaacaaaaccgaaaatgagcgttcgctctcctgacagtcttgcctaaaagaacctcgtctatactgcaaaatcccattaggtacacaagtccggtcggcattgtcacttttagcgtgacttcaatttacacattcaaagaatacctgtccggagcatgggacctggtagaaaggttaggctctctccgaaggaagttcaactcaggatttccctcccccggtgctgcacacaccatcaacggcaaaacctcccctcccagttgcagatctagacttgctgagaaaggtgctggagatgtttccaaggtcatccccagcaccgcgagtccagccttctgcaccacgcagatttttaagaggagatgcctatcgcccgtggggagtcaaaattagaacctcagtttcctttgtgctgtcaccctactggtaagaattcttacactgtagatgcactgggtgctcagaattttatcgatgatcttattatggaaagctattaataagctccaaatcagagacctgctctggaaccacggagcagggagcaagggagaaactgctatcttttcttcaaacgctcggacctagcacaagtacagaacgtagtggctgcaggctcggccgtgctcctaacagcgctgacagctggattggcggacgcactccagcatcactgtcaggaattaacacgttcccaattttcactgcacccttccactcttgtgtgaaatggagtggaatgttcttttcagcgttcatctctaaagggagaagaactatttctcactatgtgaatacctcacgggggattcccattaaataaaactgcttgatgatgacctaatttgttcattcaagagaagaaactcttcctatccatacattattgttgttatggtttccgttgttaaattatacataaaaagcctcagctgaaccaagcctattttagaaataaaaatgttcttgggacatgaatcttaatgagatccttattttaaattgcgcctgaaaatatgcattgttttcagtgcttccttatattttcaccaatttgttgtcctaaatgcattttaaaaaagttataaaatgcattttcttataatgtgttctaggtttgtctgttgcctttttggtcttaggttactttttagtgaccagaaaataaaatgtgtagttaaaagaggttttccaggctgggcgcagtggttcacgccagtaatcccagcacattgaaaggccaagaagggcagattgcctgagcccaagagttctttacaatgcagcttttttacaatgtctagatccctgtcccatccacgcac

SEQ ID NO: 46 - DNA, 2359 bp, Homo Sapiens
caagctcatatatgaaatgaggtcaacaactgccttgccaacttgttgagaatattaaatgagataatgcatacaaagtgtttttgcacaaaacctggcatataaacatgcaaattaatcttttaataagataatgtacaattttggtacaatggtagtttaattaatagttgctactttcccttagggccaagactgtaatctttttctattgctcaaagaacaagatgagtgggtgaaaacatgcacacaaaccaataaaacggctgtttcatcaggtttgcagaaacactgaaagatatacgtcttcagatatattctctccaatcaaatcctaactagaagcccaggactactgaggtacaaaagaaggacgggattcaaatgagcgaagtaacttcccgggttatagctgtaaagctaatataggaacagagtggagttagcatagcaaaggttttaagaaaatggagtctggagccaaattgcctgtatttgaatcctgcctacaccccttactcgctctacgaccttgggcaagttactaacttcattttcttcttgtatgttaattttaaaaaggggcgggacagagaggtggggtgtagtctacataataatagtgtctatctcatagagttatgagaagcagataatatttgtaaagtgcttagaacagtgctgggctggcacatagtagatgctatttattcttttaaaaaattcgatagcagcaagagcctttatactatgtgagttagactaagaaaggctgtggcatagtttaaaactatccctgctcattctttaaaataagtccacagtagagaataagacatcggaaaatacaaacatttcttcatatccgaatctatttgaatcctaagatgcagatacggagagttcagagtgccatcagtacagggcagagaggttgaagagctcaggaacagacatagggtgggggaaaggggtaggggcaacgacgctgacttttggttaacaaagcccttccaggctgcggagcaacctcctctgcccttcacctgcccggcccatctctggccaagaagaccctgccgccaaatccccacacccagtccaggtcgcagtgcacagactggcccttccgaagcccctcagcggtagcccgactccgaagctcaccgaggcatccgtgagaggagatgccacctagcgcagatcacatctgctctgaatccttgacaaccgcagcccaaagaatgataaactacaaaggccggaaatgcgtcaccgcggcccgctctccgcgaaacagcggttccggctgtgttccttctaggaaggccggaggtttccacacctctgtggtcgtcactctgaatcccgtctgtagtcttaagtgagatactaggtgacacattgtcttccacgcggcaatataataacggccaacatagtgttttaacacgtattaattcattaccccgcataacaaccctgtgagttaggtacaattatctccatttaacaggtgaggaaactgaagcacatttctacatttattagttgccatttcctgcaaagaataccctttcttttccctgccgtctcattttatcacgatgaactcatggattcctttacaaataattactgttattattatgttgatgctcaaattatttaaaatttggtcagttggagccctttcacactgctccctctcttttctttttttgacaaagtctccaggctggagtgcagtggatgcgatctcagctcactgcaacctccgcattccgggttcaagtgatcctcctgtctcggcctcctgagtatctgggattacaagaacacaccactatgccttagtgaggctggtcttgaactcctgtccctcaagtgatccgctccctcggcctccgaaagggctgggattacagaagtgagccaccgcacccggccacaaacaggtttctatgtcctttgataagttcccaacagtttttgtgcacttcactttctcacaaaagatatttcagtcccattttatactattcctaccctaaacctagaatcaccattgcttcatgaagctacagtacatcagtgaaaaatggtatatagaaaccaagatctggatttcgggcaatgaataacctcattgctactgtgtctggcattggttcctgccagtctactgtgtccagaattggctccttccagtgggttcctgctctgacttcaagaatgaagccgcggatactcacggtgagcattacagttcttaaagatggtgtgtctggactttgttccttctgctgttcagatgcgtccagagtttcttccttccggtgggttcgtggtctcactt

SEQ ID NO: 47 - DNA, 2428 bp, Homo Sapiens
ctggttctagtataaaagttggagctcataaaattgagtttactataaggaagtatacctataattgtccactgaggaagtggggaaagaaaaggaaggagaatgaagaaaaggaatcatttctggcaagcagtaacaaagaatcatgtgctctggtgttgtccttactttctctttgaccagtgacatttctgcctttaattttctatgacccgtatcaagctagacaggcacaaaatattgatccttatccacatggcattccacttaaacagttataatgggatgaaactctaaaaccttatggattgcaaaaatatttatttaaaaggaattaaagttggcacaatatatcttgttcaaagattaatattagctccaatttattctacttgcattctttaaaatcagcttaattttcatggctcaatgtcagtcaaaaaacactacagtgaagaattatcagtaaactgctaataggtatgggattcttttgaggagtgatggaaatgttctggaattagatgcatgcaaaccatggttttcacaacctaatgaatatactaaaacccacttaactgtatattttaaaatgacaaattttatgtgaaatacatgtcaattaaaaaaattagcagtggttactaacagccttcaaagttaaaaatgttttgtctctaacactctctctgaggatatggagaaatacgacattcatccttaattaggaacggagagcttttcaagcctgcacttaaaacagagagcactaaaaactctacgacctagacggttttttccttggctttccccttttcctgacaaccatgctttttttttttttccccatgtcttctagtttcactcaatatcgttggctaaacaagaatcacattttaaaatatacaacgcatcctaaattgacggagggcttttctcttttatcagtctaattcgtcctaagctagaactacctcatgggtgtgagaactgctggctttaagcttgcttccttcagatgctcctgtaccaagtcagcgggattttgttctaatatgaaaacacagctgaattagcttttcaaaagggaatggatacagagctccaatcctgctcattttagggcaagtattacaagctaaattcaggctgaaaaaccaagcaaacgaacaagaagtggatcaattctcagagaacctgccataatctggcccttgcccacttctctacctcatgtctcaagacgtcccctcgcctccaggtactttgctttatcatttgtcccgtttttcctgtcactcagagacagcctttgcacgtgcttttccctctggccaggccattctctctctcttagcctcgctgattcccactcatctttcacgtcttcccggaccaagccaaaatatccgagggagttttctaaccatcggcggtgtcctcaggggcacattaatagacgttgagaaactgagggacggcggaaaatcaccccttagcagaggaggttctagggcaccttagaggtgatttcattcgagctttcttggagaccttaggaaagccagcggcgggactgcgggacctacgcgctcggcgctaagggagggtccaggcaccaggcgggcgtttgggcgcacgggcacgcggagacttggtgggccaggagagggatgctgggtcgcaggaccgcggctcgttcgttcctctcaggcttgcgcttgccgcttgccgggccggtcagagggagcagccccggcgagctacgccctccctgcccggaccccacgctccaccccccgccccgccgcctcccgcacactcaccatccgcccgcaccgaaaggcgcggcagaccgagcaggagcagcgccgccgcccagagcccggggaggcgtctgtgccaacgggcaggcgggctgggtccctcggcagtcatggtccgggagtgcgcgggccagcggactcgggtgagggctctggctgcgtttggggttgcccaggccactgcccagcgtgcgccactcggctctgcgctctgcgctcggctcacgaatcgcaggcttcgcgccgggcgcgccgagagggaggagcgcggagagccgggggaggctcgggacgcagagccggagcgcctgggccgccgaactcccgggggtcttctctgtggcgccgaggaggcggctgtaacccggctccgccttcgcgctgggcacctggaaacctcggtgccaaaaggggctgcgctgggccgcgcgctctgcgggtacagcggggcggagggcgagggcgcagggaggcggggagagtagctagccggccgcaaggagcccccgcccgtctgggggacccttggcgagagggtgacgcagtctgacaggcggagcccctccggcagggccgttagacaacgagtgtctaactctgtc

SEQ ID NO: 48 - DNA, 2823 bp, Homo Sapiens
tgagcacgtcacagagcccaacgggccaaaagggggtgatagctccacattaacccctccccgtcctactagcattcccccgcccatctaggtcgcctcgagcctccctggctgtctctgcacccgcgccctacctggtcctcagacccatgcgatgctgggcaacccgggccgggtgtgcccaggaccgcaaagcgggaagcgcaggccttgcggactgcgagtggcccccgcggcctgctgctcccctttataacgcgcgccccgccccccgcgctccgggcgccccgccctggcccattcacctgctgtcgagaaccagacaccgcgcagcagaaagctagccgctgggccgcgaggtccggccgtcggagcgggcggggctggggcgccgccgagacagatccgatttccaccttttcttaaatgcgctgctgaaagtcgagaaggccccggccggggagctcgcgtcgcttcctcccccctcagctcccctcgcaccctgagtcccccagccccactccgggaggggccgcgaaactgcacccgcaagggcctcatacatattttaaggagcaggccaggcaggtaaccggagctggactcggacggtgagggggcggcccccggggacctgataccctggatcccttacggctcagggctcaggcgggggaagaggtggctcaggacgacctggggtcctcactttgctggcctgtccagcgcatcctaagcccgcgtgtatcctaccccctccttctgcagatccaatgtccgtctggcaattgccccattccctctcgctggagagatcccttccgcctcgccacaggcgtcccacgctgcccggagtcgtgcgccccgggacgggtagttttgggttcctcgacgcttggccaggtttaggaaagacccgctgtcttccttgctgcccccacctaggagactcggcgccttgcgctccgtcctttttaatggtgtcgcggcttgtccctctggcttgctccctcctagtccctaccccacacggctcccttcgccagctccatgacaatcccactcgtgctgaagaccttgggcaaagaagtaaccatcggtcttcccctcccttcccattcctccggcggcaggactagggggaaaggtgcccgggatacaagcccctcacgcagacccactgatgcggccgtggttctgccattggcccctctccgaatggtgaggttctcctgctaaccctggccccatggcataactagtataaccccagtgagaggaacccagagttccagtcctcccctgctccagtccctctgtgatctcgatctcgagggattcacttcacctctctaagcctcagtttcccatttgcaaaatgggcagaatgactcgcacctctggggatgaagaaaatgcacatgtgagcacgtgggtacttggcgacccggagatctctgcaaactgcaggcccagcgagatggcctcagcacgccctgcaccctcgtccgcgcgactgccgccgggtgcccgccccagccgctgtgtccctggtgcttcctccgccagggccacgtgccggggaagccaaagcgggagtctttcgatcttggcccagcccttagccctcggtcctttgctctagcatctagattctcgtgggtcaacaaagtcactggaaacccaacgaacttcccgacatttttcgaaaaccgtatgcgtgtgcttctgtgcgtttttcctctgatcgaggtagggccctgtagggttctgtttggacgggaggctggagtggttccttcccggctgcggggtcggaggatgcagagattcgaaagaaggagaaacacagagactgtcaaatgaaaggagattctgtcttcggaatcgacccagctctttaaaagaatgaggaaaacatggggtctttatatatcctggaaagtcgcctaggcgttcagtgaaaaacgcaaaaggcacgtggattcctatttgtgtaaaaatataaatggggcagggggttaaacatcaggttttttctgcacgaaaggtctcagcgcagagggttggagatttttcttttcattgtatgtctttcgggactgttcgaagccaatgtgtgttgcttaccatattcttgcattgaattttcaattaaaaaaagaaactgcaggaattgttttttgtttgtttgtttgttttgagacggagtctcgctctgtagcccagactggagtgcagtggcgctatttaggctcactgcaacctccgcctcctgggctcaagcgattctcctgcctcagtctcccgagtagctgggattacaggcgcgtgccaccacgcccggctaattttttttccttttttctttttttttttttttttagtagaggcggggtttcaccgtgttagtcaggatggtctcgatctcctgacctcgtgatccgcccacctcggtctcccaaagtgttgggatcacaggcgtgagccaccgcgcccggccaataaattgattttttaaaaagcaacctgggccgggcgcagtggctcacgcctgcaatcccagctctttgggaggccgaggcgggtggatcacctgagatcagaagttcgagaccaaccagcgtgactaacatggagaaagcccatctctactaaaaatacaaaattagccgggtgtggcggcactcgcctgtaatgccagctactccggaggctgaggcaggagaatcgcttgaacccggaaagaggaggttgcggtgagccgagatcgcgccattgcactccagcctgggcaacaagaacgaaactccgtctcaataa

SEQ ID NO: 49 - DNA, 2344 bp, Homo Sapiens
caagaggagttaggatgaagggacaggtctcaaagaccctgatgccaatatctttgaaagcctcggaggagaaatggtcgcccttggaaagaaaggactgaagagcacagagaccacagctcctcccacacacaaaccccacacacgagtctggtttgtgcctagtgaccctcccaccgtcaccgtgcagcctcctcaccgggctcacaggaactgcgagccaggctggaggcgagattgcagttagatattaaccaggtgccctcagccccgctgcttcacaggaagccgcctccctgagagtcaggtcacagcagacgctgaccgccggcttccccattggcctggggataagatctctgagagttgctcaagagtcgtctaagttctttctcagatcttgaattccagcggaaaggctggcgccaagcaggctgaagaccccacaaggaagcccactcagcagcagaatgcggtttcttcacctccagtcccaagattcacccctcacttctccaccaaccagcgaccccacatcccaaccacccccgtccagacccctaaacaccccatcctcaaacctctcacggaggcggatctagggtgtcctctcctattaaaccgtttctgctgcagccctcggcgtccgggtgcagtgacttgggctgcgaacctgtactggttccgccgcacaatctggggagaagcggggctgagggcgcggagctgcccagagaggggcgccggggccggggccgcagtcgcagctcagggacgggacaggacgcccggggtcccggctgccggcccagccccaccctgcggccaaacggaccgaggaccgaggtgcgcagggggcgctcaggtcccagaccccaaagacgctgcggcgaggcccgggtcccgccacagccggttccgactggttccgaccagcccttcgccctgcctcaggacgccgggccccgcacactcaccatttcccggctgtgcggtgtcccgggtcctcccaactcccgtagtcagggtaggtcccagcgcgacaaaagccaccacagatgtcccagggcgtctctcagtgacagaatacggaacagaggtcaccagggtgaagaggccactagctcctggaacgtcacaccctcctctctgcctcgcgcctgattgacaattctcaggaacccgcccacgactttgattgggtagccctccaggtcccgcctcctgggcactgagtgacagaagaagcgatctcacagtgctgagtgcagccggatgaacaggttccagacccggcccctggcagggcgggcttcctccctgcgttgtgacccgacccgtcccgggaaacgtttgccttaaagcggaatttcctacctgtacgcagtgggccctttttgcttcttcctcctgaacaattgtgtgcaaggaatcccagactcactgtccagtggagccatcccttggcctcagagcaggagggcagccgaggccacacaggccacactgtagcagcgggggacagggggtgggtgggtgggggggtggtgctgatgtcctccagggaccaggaatttgggatgaggctgtcgcctgcaaggtcaagcctttcttccactataagcgctggatgggttctttctgcgcgctacgcaaataaagaccacggtattgcagttaaaaaaaaagtttaataaacactaggccagctacgatacgtgagagacggagttactactcaaattattctcatccaaggtcctctggtaggggtttttcaagggcagtttgggagaaagggtggaggtagctaggcttgctactgactggttggggtggggatgaaatcactggggatggaatctgtcctcttggcagtgcgtggtggctcaccgctgtaatcccaatactttgggaggcctaggtgggaggatcgcttgaggccagtagttcaagaccagcctggacatagagtgaaactccgtctctatactataagggaggagaccacccctcatattgtcttatgcccaatttctgcctccaaagaagaagtaaaaactaaaaggcagaaatgaaatccacaggcagataacccggcttgtgccctgggctgggtagttaaaaatcaacctctgacctaactgtgttatctatgattccagacattgtatggaaaagcactgtgaaaatccctgtcctgttctgttcagttctggttaccggtgcatgcagcccccagtcacgtacccactgtttgctccatcaatcacgaccctctcacgcggactcctagttgtaagcccttaaaagggacaagaattgctcactcggggagctcggt

SEQ ID NO: 50 - DNA, 2246 bp, Homo Sapiens
cgcgcgcgcgcacactcacacacacacacacacagtcgccagttgcgcacacccgcagcccaagccggacacacgtgcaaaccgcgtttttgtgcgctcatctcccccgagccccggctgcgcaacagcgggagggggttggggggggccactgggcagcttattttaaaataaaagaaaaatcgtccttatatctcctccatcctgggagcaggaccccctgagaaggggggcggggtgctgtgtgagtgaactaaattgaatcaatgcaagtctccacccacccaaaagctctttcggacttggactttgggggtgggggcgtggactgtggaaaagggttggggtcgacatgggagttggggggacagtaagaatcgcttcgtttccctggaaaagtcgcttggtagtttttacttttgttttatggtcgcgggcggcgaggggaggggagtagatgttggagttcaacttccaaaaagtgtctccatataaatcctggtattacagactctgggagggtgaggatgacaaaataaacgacactaagacaacagaatcaagagcacgtgagggggtgagaagtgtttgagaccttgtttgagtcccacttggaaaaggattttcactcaaatctttgtcccctcccctcaccttaccccgattaactcctggggtcaaacacgaccccacctcctaaactgggtctatggcaagcgagagggtaaagggaccggggcgctccacgtgggagagggacttggacttgccagcccaggagtaggtgtggccaaatctccgcagatactcgggtgggtgactccaggaggcgcccctgacaatcacagcaacctggaagtcacaccccgccccccgcgctcctcggcccagggtaggacttggaaatgcctgtcagactgggaaggacgcagctgccttgtcagccgtttgatctccaaccggcgaggacaagaggagttgtggggcctctccgtggcccggggacaaggccagaccacggcccccgtggacaccccccattccccaggctgtggccaactttgtcaatttgatgacctggcctccagggctgggcgcgccacgcggctggcctcctctcccttctcagggtttctctggaggcggccagggcgggtcggggcctggctccggctaggcttcgcgggcgagtccagctgcacccaccccactccgcccccaggcctggctccggcggcttcacccgggcgcatggcgaggccgtgacgcctcagcgccgcctccctcggggccttttcctcggggggcacacgggggtttttgttttcgtcccgaaggtcttgggtggggcgatggcaccaacaatttaacagcgcccagagtccgtgagcgagaacagaaagagatcccttccagtcccataccctaaaaaataataacaataaaatgtgccctggcttgcagttctgtaaactgtgggctccacggtgggcggacgcgaggccgagcggatggagaccgggggcggggcgcggacttgcacctcctcgccctggccgggcaggctgcacccggctgcccacccccaacaccccacctccacgtggtccaaagtctagtagggcctccctcttctgccatccctctcaccgggaaaatctttccaggaaagtggcttaaaaaaaatatgcccacacgcacctttaataaacttctttaagacattcataaactggccatccctactcgcccggactctaaatttgaaagatcaactcgcgctctctttctgagaactagcgatgtgaagcccagagagggtgagcactttgccctaggacacacagcgcgtcagggacaggtctggacccaaaacaccgcggcgtgcctgcagcccagcgccgccggcggtccgggactcgaaatcccgacccacgaccctcaccttcctggggttgattacaaggaaggcagaccccgccagtggcaaggcgggacggggaggacccctcaggaaaagggagcccctccgcgagcggcgcaagggctctcggagtcccagctgcagccgccaccccgcgtgcggtaaggggccgtgcctggggagggggcaccccctccccactcccagcaggaagtagctggcgtgggccggcgcgtgccccacggacccgaggagcacttcctcattggccccgcgctgccccgacggcgggaagagggacgcgcgggcgggcggacgcagg

SEQ ID NO: 51 - DNA, 2357 bp, Homo Sapiens
cctgcagctcccgggagcgggaacgtcggggacaagagctgaagggacgaaggacactggagatggccagggggaaactcggcgtgactctctcttagggctgtgtgagggttttcaaaccctcatccctgtttagggccggcagcgaggcctcaccacagggacaagcccggtagacctttctcctccttaggctcccagtaaaatgctgggtcccttgccagtggaaaacggaagaaaagtttggagcgtttctggagccgcccgtttgggaagaaatgaactctgaccccagctccggcccgtgtatcggaggtcccagggctgcgagggtcgcctgggcagagctcaggccaagaaggagctcggctgaggacaggagcccggggtctgtgtgggagacgggatcccttcctaggatgcccgggctggcctgctgggaggcggcggggtctcctcctcagggtcctgcactcgggtttcacatcgggtgaaatttctgggctggggctcagcacgcgagaccgctgcctcacgcgggccacacagaccacctccccgcgggccgcagcccctggtcaccggccctcctctcggtgctggggccgcctggagccgctgggagccgagtggccctcggggaggcggcgccgcggtgcccagggtgcggggtccgcctctgtgcgcctgagggcgggggtcgtacaggagctcttcccggggctggtccccgaggcgctgcacctcctaccagcttcctgtgatcgaaaccgaaacctccacctgcgcaaccctcccagatgggcttgaggttggggtgtggccgggacccgggcggggaggggtaggggtggagtgaaggcggggtctgggggggtgcgcgtggacggggagagtggaaccgcgggtgtggacctccaagtacagacgtcagagaacgtttgtcgtcctggctcgttggtctaggggtatgattctcgctttgggtgcgagaggtcccgggttcaaatcccggacgagcccgcttttttttttttttctgaacaccatcattttctcgcggtgaagattgaggagcttcacggagtctcggccgcagggaacttggtctctccgtggcagctgcaggcgccggggccgatccgacttcccgcttccgtccggcttgcggcccctcgccttgcccggctacaggaaggactcgcctgcgcctcctgactggagccttccacctgggagttctgagtgcgcctaaggcctggcgctgaggcagtggaccccagatccgggacccgaaaggagggcaaacacctccaccgccgcgtctgcctctgcggacgtggccctagatcccgggtggccatggaacttggtctgggcgtgtagttttcctttgagtgggtcggttctaagtttaaatttccgacgagcccagggtttcgaacttccttccttttttccttcgtttctctttcttttcttttctttctttctttctttttctctctttctttctttttctctctttctttctttctttctttctttctttctttctttctttctttctttctctctctctctctctctttctttctttctttctttttctcttttattttcctttttcttctttttttgttttttgttttttttgacagtgtctccttctgttgcccaggctggagtgctggagtgcagtggtgcgatctcggctcactgcaacctcaacctcccaaactcaagggatcctcccacctccacctcccaagtagctgggactacaggtgctcaccaccacgccaggctaagtgtgtgtgtgtgtgtgtgtgtgtgtgtgtgtgtgtgtgtgtgtttgtgtgtgtaaaaccgaggtctcgctgtgttctggaggctggtctccaacttgcactcaagcaatcttcctacctcggcctcccctcacaaagtgctgcaattacaggccagaaccaccatgctcagctggttccttttccttccaggtcctgaggtcgcagcggcgcgtccctccggtacatggcggggaagaggtgcggttccgggagcctgcgacgcctctggggagtccaagcccggctcctagccctttgcccgaggacggaggaggacctggggggcttcccctagctggtggtctcagttctccaggggcggcggagacagcaggaagccccaaaacccgagctgggtttcctgcttggagtcgcagggtgtggcaatgttgaagttcgccgtgcccctgctccctatgggaattagaatccggtccaggacaagcatcgggaaagggggacagtttgtgaccgaggaaactaggactgatccagaacagcgca

SEQ ID NO: 52 - DNA, 2290 bp, Homo Sapiens
taacaaggttcctaaagcctctatattcaatgtgtggccccggaaccagaagcattgtaatcacctggaagcttgcttgtcataaatacagatacttagaccttgcttcagacatactgaaacagaatctgcattttaacaaaagacccagaggattgcttttacattgtgtgtgtgtgtgtgtgtgtgcatttaaaaagatacaggtgtcacaatttcttattgtttggtcaattttaaaatttaatactgtataatggatatctcttatgtcaacacagatctacgttattattcatcataaataaacagtaagttattgtatccatcgctactgattggtattcatattaatccaatattttgctattgtaagaaacattctgattcagaaacgctgacgtaaagacctctgagcaggacatctaggagacactgactttgttatatctccctttctgttatatcttgctgccttaatagaccacgtgggcacatcactttcactgatcttttttttctttgtaaatgtaaattttaattgaattataaggccagtttacagtgcatctgtgggcagatttctttaaaatgcatggtactttaaactttgtcttacgagaggtccaggaaaatgcccactaagcctctgtgattttaataccgtgccaggccatggcaaagtgaggtgcctctgacgtttgggctgccacagcgtgtttttcagttactctggtaacacctgtgacctgagggttattctattcgcgttagcaactcgcgcgggttgggaggcgccaatgagagcagggcttgaaactagcgcttggcgtctgatggttgcctagcgacggtcgtcgacgctaatccttggccggacggatccacatctgttttctggctaccgagagggcagccatgaacacccaaaagggttccctcaccataaacgtccacagaggttccctcgccatgagcatccaaaggggttccctcgtcccccgggatatggatagctcgggtagagacatgcagctgcgggtgatcccggctgaggtgaagttcctggacacgatggccgggagggtgtaccgcctcccgattactgtgcataatatttgccgctggaaccagaaaatccgatttaaggagcccgtcaagccacaggtgacacactaaggggtgctgggagcgggaccttgtgagagcgcctcctcacactgcgtctctctttgccccagggagtagtcatctggctcctgccgggatggagggaggattgggcttcccgggaaacagtgacaggtttctgtgtgtgtgctctttttgtttctctttgttttctgttttgtttaggattaggagatggggagggcagggtggagaaaagctgacctagagcctccccatttcttcaacctgggtttagaaacttgttaacaatcccaaaatctgtgcaacttggttttatgattttgctgttgccttaagaattatgagaacaaaattctctattaactgccctttgaatcataaagtgcctgataactccaggaactgtaggattagtggaaaggttcattatttcatattttaacaaacatttgttaagcacctactatataacgggtaatagacatgaggaatacggaatggacacagccctgccctcatagaacttagaaactaatgagggggttttagtacagatctaaccatcaagaaagttaatgttctgagagggtgtttctatcttctaatttaaagtgggcagaatttcctctgtatctcactgtgttattttacatcatgtgtgtgaatggatggttattagttcagtatgatcacattttctcaggcaaatttttgatataggaaatgcgataagaatttttgaaatgtaagcaataaataactgaaaacttcaagagatattcctaataaaaagtagtgttgaatacagctggactatatgtgcagaaaaaaaagatgtccgtaattttagattaaatttacatatatttctttgtatatatgtagaaaaacctatgttaatgattagaagagcaatgagaaaaaggacttccatgttctaatttttgctctgttaaaaaaatcgatgtattatttacttactaaagtgcacagatctcaaaagtaaagtttgatgaatttacaaaaaaataaatatgtgtgtgtgtagatagatagctagatagataatctccattagctaccacctggatcaaataatagaatatgttcactaccccagaagatccccagtgct

SEQ ID NO: 53 - DNA, 2375 bp, Homo Sapiens
agcctccgcggctgccttccaggagagagggagggaggaaaagggggaaaaaagtgctccgcgccgaaggcgaggtccgcactctccgtccccgcggctggcgcaggacctcactcgagcggagcgcccacggggagcgggtcgcggggcggcggcggcgaggaggaggcgagaaggagttggaggaggaggaggaggaggcgagggcgagctagcccagcggggtcccggccgccccgcgggccaaagtcgagccctcccgcccgtgggcgagcgcgccagccgccccttccagaacagccgccgccacaaagaagaacggggggtgccgaggtccccatgacctcctaaagtggtgcggtccctgctgagtgcgctgcccgggccgtgacccgcgcccctgtgcgtccccgcgcgcctccgagcgcccctgtgcgccccggcccgcgccccgccggcatggacgtccatacccgctggaaagcgcgcagcgcgctccgcccgggcgccccgctgctgcccccgctgctgctgctgctgctgtgggcgccgcctccgagccgcgcaggtaagggcgccccggggcgcggggctgcgggatggggcgcgcgcagcccgggcgccgctgtcatccccgggcgccttcgcccgcagaacttttcttccttggcctgtggaatgcacgggccaagaccacgaatgccatttgctgggggcccccccgagatgacgacacgcagacacaatgcccgcgggcgcgccgccgccccctccccagacgggcgggtcgggtggggctgtcgcgcgagccgaggaaggaccgagggctggatcagcaggaggggttgtccacgaggcgggcaaacttttgtcccaaaaaccttccttctctgtcccacatcacaggcgcccagcttgggccctcacagccctacagcagaacttcctctgctccaaaccgggcagggccgccccctagagttacagcccttcaaatcccgggactcctggggatggggggaatcccagaagcctgggcccccagcactgaacttcccccaggcactgtcactctaggctgagctggcgccctgctttccccagggacagcgtttcctgcagccttggtcacctaagtgttcgggggcactggggacccctgcagggtggtagacagccctgctcctaatcccacccccaaacttcttgatccctggaaggcagcttttcctggattcgctgctgagagatgggatgcgtggagcaaagccagagatgggcttgcaggcggggctgtgagtggttgggatgatatgcagatgtgggattccttctgccaagggtcagcccttagaaggaggcttgcttcccggggagggcgcttcaaggcggggactgtctgcgtccctgcctgggttctcgagggttcaactctccctggcgcagcttcctgacgggggagtttttctaggcatcgctcttggtagttagtggcggggtgggttttcacagactctcgaacatcagagcccccagccctggaaggtcccccgaatccttattgacaggcggggagatggaggctcagagctgtgtgctgccaggtcaggagaagtggcgggcagagcgatgggacggtgggctcagcgaacgtctggaccagcccgccgcctgccagcaagaatgcttctctctgcttcacgattggaagacaagtgggaagaatcattgtccgtgttccgcttgtcaattaaaacactcttttcctttttccctggcacgatcagtgcttgttgggctaactggatgagctggagtctgggtgtgggggctgccctggggctctgggggaggagccaggagcctggcctggctcccaggacctgggatctcatccctgggccgccaccaactctctcctgaccctgggctaactgggcttgtgtttctccaggggttagctgaaggtgggggacaacagaggtccccagaaaagtggagaggagaaggaaggtgtggtcagggactgtgccattgccgggggactaggccctgtctcagcgcctctggggacttttccccagaaactcaggagggagtccttcaggggaatcgtcaccctagacagctggggcagggcactgcctggggaccatgcaccggactgggcttggggttccatttccctccctgcccatctccccacctccacactgtctttttccctctctggttgccctcgctaatcgaagtgcggctcgttggaagtgggagtgaggatggcccagagcagcaggctatggagttggacattttgcttttgtcagaacagacttttagaagcatgtggagagaccacttttcttagtgagttt

SEQ ID NO: 54 - DNA, 2227 bp, Homo Sapiens
ccgccccccgccgtggccccgccccttgccgtggctgggatctcgcgggaagagctgcgggcacggcggtggctcggtctcccggctgcgcgcggagcgggagggctctcctcacacaagcgcttccttgccgagaggctggagctgcggcaccgcaggcctgagccaccccttctctgctgtctccttctcttcctcagggctcccgtgtctgctcgccctccgacgctgctcaggttagaaagcccggagcgcgtctccgctgaggagcggtcggggagcggggacacggagcagccggagcaggcgggctcctgacgggggcggctctgggggctgcgcggcgctgcctggtgggcgcgaggcttggcggggtttgggagtccggggggcgaggaggcggtgcagtgggatccgggcgcgggcgcccaagggcggtgtagcgggtgccggagctcccgaggtgagggggcaatgtattagggatcctgggggctcttccggcttggggtaggggtgggtggcggcacacggggtcctaggtctttgacgtcgagggagatttatcagggtcttgagcttcttggaggtggtgtagcggggttccgggacaaggggtctttttacccgggtcccgagctctttggggcagagaatgcagtttagcaaggtttacaccggtgtaaaccttgtctctggaggcagatcatcggggtcttgggggttctttgagcgggcgtgggcgtccgtttcgcattgctgggatgaagaagcagtgtgtccgggttctggggagaggggtctgttcatcggtgtctccgggtgagagagcgatgtatccgttccgctggggccggggccgccttggggggttgttgggggctgagggtgtgtagcggcgaccagcgtctggccggggtttctgctttgcccggagcggggcggtaacttggcatggtctccagtcttttgggggcgacggggcgagttagctggcccccgggcagtctctcggggtgggcgcggctccgcaggcgctgggtccgctgagggcgggagagggctttggtgctaccgcgcaggctgggcagcatcctgaaacgtttttgttcaggtctccttctctctggatgagatttactcaatgcttagttggaggattgatcggtgttgttgcctagttgaagaagcagtgcgtttgttctgcagttttcttttctctgccccgggatccctgtgggggcgcgctggtctcgctggagctccgggagctagagtggcagcaccttaggtgggcgtttggtctgcaggttctttaggaggccggtgtccgcaggttgagcgtggatacagctcctgagcaactggaatctgttgagggtggggaagactgattttggcttgctttcctaggtggtggtctgctttgctcatcctgcatgattagatctgttctgaagtcttgcctgagtgaatgttaggcagagtcggatagtgcagggaagcgtgttctgtctggcttctttctgtcctttgaaaagcatttgtagagagggataacgtcaaattcagcctccagaaaacaatggaatttgaaatcccaaagctagaactctgcaaaaacgttttctgtgacctgtaaggatggttaatcgagcttttttagagaattctgcttaacagtttcattgtattgtaaaagtgtatttagccttggatattacagaggttttggtaactagcgtaggcgtaggtgggatttaaataaaatgacttgtatgtatgtgtattggttaaaaaaaaaaacagcgtataggtgagaaagcctatgtgtttgcctgacatttcttttggttagttactctatcacagaggcctgtatatgaaagttaatgtggcaggcagtgaagtccgtactcagagctgttctgtaaatatgtaatctggggttaacagacaaatttgagtataccaaagcaaataattttgcctgccttagtctttttcttcgtgtcagttttttttttttcttgttttttggtttgtttcttttgaaacagggacttattccgccttccaggctaggttgtagcatcgctaccatggctcactgcagcctcgacctccaaagctcaagcagccctcccagttcagcttcccatccccacccccagtagaggagctggaactacatgcatgtgccaccacgcctcactaattttattta

SEQ ID NO: 55 - DNA, 2299 bp, Homo Sapiens
gcgagcctcggccgtgggtcaagtccaaagagcgtgtttcggttgtttttttaggttaatcccacttgccccccaccccagtaaacttcccacccaccccacctcactttccaggtctttcctgttgcgttcggctgcactgcgatctgggaagaagggagaagtgccatctcccagcgcgcgggatctgcggggaccctcgtcccctcgctggttgacaaagaactaacacccgccccgccgcgcttccggggccaaagaacgaaaactgccttctttttttctggcggacacggagcgcgcccgcggcgggccgaccagcccgggagcgcagcctccgcgaaggggcggcggggagcggcggggcccgggcgcgcggagagcgctcaactaacagcgcacctggacgcgcccggctgcggttccgactccgtccccgaccgcgcccgcggggccccagtctccgcatatcacctcccatagcgccccgcttccacgcacgtcccagctgctcttacccgggaaatggcgagaggctgctcgaagtccttgccgcccacgaggcggaagccccacggccccgggccctggaggtctatctgctgggtggtcatggcgcggctgtggcgggcgacgacccgcggggacagacgggcaggacgcgcggaacagcttgcagggcacccccggcggctgtcggagaaagagcggcgcggcgcgggcccggggagcctggggctggcgggggcagggcaaccgcgagggccagggcgggggcggctccgcccaggccgcgtagccgcccgccgccccgcccgtcctcccgcccgcagccgctccccgccctgcgcgccggcctgggggccctggcccggagtcccgccgagagagcgcgagtcagatgcggggccggggctctcagcagctctgcccgggaccccacaccgcctccctccctcctgtacgcacggccgcaccgcggctctcgggcccggggcgggtgctaggtgagagggaagcaggtcctgacagcgagacaaactcgcgcctcgtgctttgtaaaacgagaaatttgaagtgctgtgccaagtcagccctctgaggtcggctccgacttcccatttgctttttgtaatcggtaatgatgtttaaaaggtgctttcgaacgatctcatttgatgctgaggcaaccgggacgtttagtcccattttacagatgaagtaactgagtctgctcagtaggtgagaagacttgcccgacgctacaccactcgtcagcatctggaccactgcccgggcccagtgctgcagaaccccatcctggaacttttataatgctaatgagaccatcactcaggttataactgaacttcaaggccttcctagaaatctttcctccaggctggagttcatggtaggttctgacctcaacagttcaaacctcaagtttggggcgggccaagggccaagtcaatgcaaaagaagagctgagtccgggacctggattcccagcctcccaccagcttcctagccaggctccccctgacgccctcccggtggagtgcattctccacgccggaccagaccatttctcatgctgtccatggcgtccccacctcaccaccagtgaaaacccagatccttacaatgcctacaaggccacccctagaatggccccaactccctctctgaccccaactcctcctgccctttcctcacctgccccccagtctgccaggctgtgctccttgctcctaactcagggccttgcctcagggccctgtctgcaatgctgttctcccagacatccccaccactctctgtcattttctaggggccggacacgtggctcacgcctggaatcccggcactttgggaggctgagtcaggaggatcagttgagcccaggaattctagaccagccccagcaacacggcaagaccctgtctctacaaaaaaatttaaaaaaataaaaattaaccaggtttggtggggcacacctgtcccagcttctagggagactgaggtgggaggatggcttgagccggagaggtcaaggctgcagtgagctgtggtcgtgcaactgtactccagcctgggtgacagagtgagaccctatctcaaaaactaaaaaataaaaaaaatgcaaatgtcattttctgaggtcatctctgagcatcatttaagatatcctctctagaatgctctattaccttcccctgccttatttttttcttttgtatgtatcaccatctggcattctctatattttgtatatttatttgttccacccccactc

SEQ ID NO: 56 - DNA, 2388 bp, Homo Sapiens
aactctcactgaatccatttgaaggttttgtaggtcttacaacaaaccctattcagccttgtattaggcatgttacagaaccaacgaattcggagatgaagtcaggtcttccagttcagcctgcgaggaagacaggtgatccgaatcctaagaatgcaaaagatgggccgggtgtggtggctcatgcctgtaatcccagcgctttgggaggccgaggcaggcagatcacctgaggtcgggaggttgagaccagactgaccaacaacggagaaaccccgtctctacttaaaaatgcaaagttagccgtgcgtggtggcccatgcctgtattcccagctactcgggaggctgaggcaggagaaccacttgatccctggaggcggaagttgcggtgagcggagattgcgccattgcacaccagcccgggccacaagagcgaaactccgtctcaaaaaaaaaagcaaaagatactaccaagccctgcggagcaaggtacctcacacttcatgagcgagttaagatgggtttcacaatttttcaagcaaggaaacgggctcggaggtcttgaacacctgctacccaatagcagaacagctactggaactaaaatcctctgatttcaaataacagccccgcccactaccactaagtgaagtcatccacaaccacacaccgaccactctaagcttttgtaagatcggctcgctttggggaacaggtcttgagagaacatcccttttaaggtcagaacaaaggtatttcataggtcccaggtcgtgtcccgagggcgcccacccaaacatgagctggagcaaaaagaaagggatgggggacttggagtaggcataggggcggcccctccaagcagggtggcctgggactcttaagggtcagcgagaagagaacacacactccagctcccgctttattcggtcagatactgacggttgggatgcctgacaaggaatttcctttcgccacactgagaaatacccgcagcggcccacccaggcctgacttccgggtggtgcgtgtgctgcgtgtcgcgtcacggcgtcacgtggccagcgcgggcttgtggcgcgagcttctgaaactaggcggcagaggcggagccgctgtggcactgctgcgcctctgctgcgcctcgggtgtcttttgcggcggtgggtcgccgccgggagaagcgtgaggggacagatttgtgaccggcgcggtttttgtcagcttactccggccaaaaaagaactgcacctctggagcgggttagtggtggtggtagtgggttgggacgagcgcgtcttccgcagtcccagtccagcgtggcgggggagcgcctcacgccccgggtcgctgccgcggcttcttgcccttttgtctctgccaacccccacccatgcctgagagaaaggtccttgcccgaaggcagattttcgccaagcaaattcgagccccgccccttccctgggtctccatttcccgcctccggcccggcctttgggctccgccttcagctcaagacttaacttccctcccagctgtcccagatgacgccatctgaaatttcttggaaacacgatcactttaacggaatattgctgttttggggaagtgttttacagctgctgggcacgctgtatttgccttacttaagcccctggtaattgctgtattccgaagacatgctgatgggaattaccaggcggcgttggtctctaactggagccctctgtccccactagccacgcgtcactggttagcgtgattgaaactaaatcgtatgaaaatcctcttctctagtcgcactagccacgtttcgagtgcttaatgtggctagtggcaccggtttggacagcacagctgtaaaatgttcccatcctcacagtaagctgttaccgttccaggagatgggactgaattagaattcaaacaaattttccagcgcttctgagttttacctcagtcacataataaggaatgcatccctgtgtaagtgcattttggtcttctgttttgcagacttatttaccaagcattggaggaatatcgtaggtaaaaatgcctattggatccaaagagaggccaacattttttgaaatttttaagacacgctgcaacaaagcaggtattgacaaattttatataactttataaattacaccgagaaagtgttttctaaaaaatgcttgctaaaaacccagtacgtcacagtgttgcttagaaccataaactgttccttatgtgtgtataaatccagttaacaacataatcatcgtttgcaggttaaccacatgataaatatagaacgtctagtggataaagaggaaactggccccttgactagcagtaggaacaattactaacaaatcagaagcattaatgttacttt

SEQ ID NO: 57 - DNA, 2256 bp, Homo Sapiens
aaactcttatcacaaataaactatatcaagtaagctaaagatagtaaaagagcaaaaatgttagcagatattcccaaaatggtaactacatattacctctggaatgatcacatgaatgtggctcattatttcctaagttcctacagcaaacatatatttatttgccctactcagttaaaaataaacacaatatgtagttgcttctgaataatttttctctctctctttctctctttctttctttcgacaaagtctcactctgtcacccaggctggagtgaagtggctccatctcgctgttcactacaacctcagcctcccgggttcaagcgattctcctgcctcaacctcccgagtagctgggattacaggcgcctgccaccacccccggctactttttgtatttttagtagaggcgaggtttcacctgttggccaggctggtctcgaactcccgacctcaggtgattccccccgccttgatctcccaaagtgaagggattacaaggcgtgaggcaccgcgcccggccgcttctgaataatttcgatcaaaatttatattcgatatttattccaacatacaccacagatttccactgataatccctcctagtaagaaagataagctccatccaggtatctgtgaattggaggctaagtagtcccagcacatcttacatttctttaagactccctttttatcccaaacgttcgtaaattttgtatctgataaagagcatacttccatctaatacaaatatgttccccccttcagatcttctcagcattcgagagatctgtacgcgcgtggctcctcattcctcttccttggcttcccaagcccccagggcgtcgccaggaggaggtctgtgattacaaaccccttctgaaaactccccaggaagcctcccctttttccggagaatcgaagcgctacctgattccaattcccctgcaaacttcgtcctccagagtcgcccgccatcccctgctcccgctgcagaccctctacccacctggatcggcctccgaccgtaactattcggtgcgttgggcagcgcccccgcctccagcagcgcccgcacctcctctacccgaccccgggccgcggccgtggccagccagtcagccgaaggctccatgctgctccccgccgccggctccatgctgctccccgccgcccgctgcctgctctccccctctccgcagccgccgagcgcacgcggtccgccccaccctctggtgaccagccagcccctcctctttcttcctccggtgctggcggaagagccccctccgaccctgtccctcaaatcctctggagggaccgcggtatctttccaggcaaggggacgccgtgagcgagtgctcggaggaggtgctattaactccgagcacttagcgaatgtggcacccctgaagtcgccccaggttgggtctcccccgggggcaccagccggaagcagccctcgccagagccagcgttggcaaggaaggaggactgggctcctccccacctgccccccacaccgccctccggcctccctgctcccagccgcgctcccccgcctgccagcaaaggcgtgtttgagtgcgttcactctgttaaaaagaaatccgcccccgccccgtttccttcctccgcgatacaaccttcctaactgccaaattgaatcggggtgtttggtgtcatagggaaagtatggcttcttcttttaatcataagaaaaagcaaaactattctttcctagttgtgagagccccaccgagaatcgaaatcacctgtacgactagaaagtgtccccctaccccctcaacccttgattttcaggagcgcggggttcactaagtcagaaaccctagttcaaaggattccttttggagagtcggactgctctctccttcccctccccttcccctcctgcgtgtaaaacggctgtctggggcaagggtttctcagacgtgtacattgcctggtataagagcagactctgaaaagatgaggtttatttaatacggacgggggagaattctgcctgtaggcagataggaaaatggggagggagtcattggaaggacggactccattctcaaagtcataattcctagaccagaaaaagtgctcagtgttctagaagcagagttgcacagtgatccaaagaccagcttcaaatactgtcctgtctccttcacacttctcacatttctctttcctactgaaaataccttgcatttttcgtaattataaagggggaagg

SEQ ID NO: 58 - DNA, 2226 bp, Homo Sapiens
ttggcttgtaatatattacatatttaaaagaattactatttttctgaataccattaatactaataatagcatcacagtgactaagagtggacttaaataaaggctggcttgaaactcaggtctgccatttattagcaagcttctaaaaattctgagcccttagttttctcacatgtgaaatggagaaaataaatctgcaaaattaattaaatctgtccattcatatttttctctccagtgtatattaactggcattcctcgttaggccagaatgtgctctcaaccatgctccaaatccgctttgtgccaaccccactgccagaaccctttctaccttgagaaccagaaaaggaaacattatgcctggcaatgcctacaccctccaaaataaatctgcaggaaagaacacccagtaagtgatgagagcagcaacgactgcctttatcattttaaatttacaacaccaccttttctagagcctcttaagcattgtagataattccccactcattaaaaaataaattgtaaccataagtattcagggttgatactgcttttgaattagacagtgctcatatcagttgcataagaccaacctaaagtagaggatgaaatcttttttctgaacctttttcagaacgtaacttagtgaatatattaaaactaaactttctttgaatgggagtaatttctacggattaatctgtaatctcttagaccacacctaaggtaatgtagaggttgttgtatcataggctttgtgattagagaccactggatttgtctttggaaaagtcactcatgattctttgggctttggtttcctcatcttttataccggcttaataatgaccaccgtagagttgtcatggaagttaaatgaactcatgtaccataagtgaccaatacaatgattgacactcagtgatttatcaataaattaaaacatttattatcaatatgacagagaaggtgccgctaaaatagacaataggtttttggaagaggtgattaaatggatgcaaaatttatggattgtttattccgtctacctttgctgtgtcccctggttgtggcatacacacgtgtgggtataaaatcgtaaatcctatgtagtcgcgtagtgcatgcgcagaaggcttagacacgaaatgtcatttcagcaatgtgcctagagaagctctgacgccgccttggaagtaagtcgttgctgcctgacctttgggcgtctgggacggatgcctatacctgcacccagcagcactggaaggggcccaggcccttcgcagcacagcctatccccagaccgcttagtccttcataacatatatctccacggaaaagggtatttcctcccgtcagaaaaagcgccccagtctggtctgggttggtttttatttcacgttgttgcaagtaggcgaagtcccttctgtctcctcccttggggtaagtggaaaggagtccggcagggggcccgcagtggcctgcacaggggaactgggtagcgagagagttccaggcaattccgggggctgccccacagaagcaggtggggatcgacagtggctctccggcccagggaggagagcgcggtcgcgggtccctcccctcagcctggaggctgcagccgctcgagtcggcccgggtgggggcggggtgggggcggcgcggagggcacggagattacggcggcgccacccgggacatccagggccccgaggccctgggcggtccccacgcgagatcgcaaaccatgacaataggcagtcacccgaggtcaaataaaaacggagtgggtcccccgcgcgccgccgccccccgcgtccctggcggcctcccccgaggcccccggcggcctcacgagcccgcagtagccggtggcgacgtcgcccccgccccacctccctgcgcaagtgcgaggctgccggcagcgcggcgcacgctccggccgttcccggcttccgcgcaaaacttccatcctgtccacgtgaagttgtcgctgccttagagagggggaaagagctgcgggaaaagccggggagtgacgactgcggcggctgggcgcgctctctcattttcttttcttctcctttcccccctgtcgcagtccggagttttggctcctctcctttcctcctccccctcggagccggcttctccctccgccccgcttctcccccgcttgtgtacgctatttgttgtggggtggccgaaggggatgtcctg

SEQ ID NO: 59 - DNA, 2301 bp, Homo Sapiens
aatatctagaataaatggagatctgcaaatcaacagaaagtaggcagcaaagccaaagaaaatagcctaaggcacagccactaaaaggaacgtgatcatgtcctttgcagggacatgggtggagctggaagccgttagcctcagcaaactcacacaggaacagaaaaccagcgagaccgcatggtctcacttataagtgggagctgaacaatgagaacacatggtcacatggcggcgatcaacacacactggtgcctgttgagcggggtgctggggagggagagtaccaggaagaatagctaagggatactgggcttaatacctgggtgatgggatgatctgtacagcaaaccatcatggcgcacacacctatgtaacaaacctgcacatcctctacatgtaccccagaacttcaaataaaagttggacggccaggcgtggtggctcacgcctgtaatcccagcactttgggaagccgaggcgtgcagatcacctaaggtcaggagttcgagaccagcccggccaacatggtgaaaccccgtctctactaaaaatacaaaaatcagccagatgtggcacgcacctataattccacctactcgggaggctgaagcagaattgcttgaacccgagaggcggaggttgcagtgagccgccgagatcgcgccactgcactccagcctgggccacagcgtgagactacgtcataaaataaaataaaataacacaaaataaaataaaataaaataaaataaaataaaataaaataaaataaaataaaataaaaaaataaaataaaataaaataaaataaagcaatttcctttcctctaagcggcctccacccctctcccctgccctgtgaagcgggtgtgcaagctccgggatcgcagcggtcttagggaatttccccccgcgatgtcccggcgcgccagttcgctgcgcacacttcgctgcggtcctcttcctgctgtctgtttactccctaggccccgctggggacctgggaaagagggaaaggcttccccggccagctgcgcggcgactccggggactccagggcgcccctctgcggccgacgcccggggtgcagcggccgccggggctggggccggcgggagtccgcgggaccctccagaagagcggccggcgccgtgactcagcactggggcggagcggggcgggaccacccttataaggctcggaggccgcgaggccttcgctggagtttcgccgccgcagtcttcgccaccagtgagtacgcgcggcccgcgtccccggggatggggctcagagctcccagcatggggccaacccgcagcatcaggcccgggctcccggcagggctcctcgcccacctcgagacccgggacgggggcctaggggacccaggacgtccccagtgccgttagcggctttcagggggcccggagcgcctcggggagggatgggaccccgggggcggggagggggggcagactgcgctcaccgcgccttggcatcctcccccgggctccagcaaacttttctttgttcgctgcagtgccgccctacaccgtggtctatttcccagttcgaggtaggagcatgtgtctggcagggaagggaggcaggggctggggctgcagcccacagcccctcgcccacccggagagatccgaacccccttatccctccgtcgtgtggcttttaccccgggcctccttcctgttccccgcctctcccgccatgcctgctccccgccccagtgttgtgtgaaatcttcggaggaacctgtttccctgttccctccctgcactcctgacccctccccgggttgctgcgaggcggagtcggcccggtccccacatctcgtacttctccctccccgcaggccgctgcgcggccctgcgcatgctgctggcagatcagggccagagctggaaggaggaggtggtgaccgtggagacgtggcaggagggctcactcaaagcctcctgcgtaagtgaccatgcccgggcaaggggagggggtgctgggccttagggggctgtgactaggatcgggggacgcccaagctcagtgcccctccctgagccatgcctcccccaacagctatacgggcagctccccaagttccaggacggagacctcaccctgtaccagtccaataccatcctgcgtcacctgggccgcacccttggtgagtcttgaacctccaagtccagggcaggcatgggcaagcctctgcccccggagcccttttgtttaaatcagctgccccgcagccctctggagtggaggaaactgagacccactgagg

SEQ ID NO: 60 - DNA, 2485 bp, Homo Sapiens
agtccttgtggatgaactgtaacctagcttaataggcagacaagattgaaaacctaatttaggagtatgtgcctttaacaatagctgagtcttggccaatcccagtggccatacttcaaccattcatacactgctgagtgttcaaactgtgttcaaagaaggcaaaagccaacctgtaaccaatccagttgtttctctgccttacctccaatttctgtatgtcacttccctttttttgtctataaatatgttctgaccatgaggcatccctggagtctctgaatccgctgtgattctggaagctgccccattcgcaaatcattcattactcaattaaactgctttaaatttaattctgctgaagttttcttttaacaggtttagaaaaaataatggcaaaaatgaatgaaaatccaataaccctggaagcagaaaaggctgggggctccaataagtgtaaatagtcccatccctatattttctccatggcaattacaatccagcacattatatatatatttttttgcttctcgcattttggcttagggtaaagctttttaaaacaggcactgccaaccagtgttatcaagaaggtctggatgccgttttgtgggaacattttaaagaggaatgtccaaaaggaaaagggggatgggttgggagaagggtatcaggcgggtatctcaaaaccattcttagggctataggtttaatttatttggttgtggacgtcagagccgtcatggtaagaaggaagcaaagccttttgtaataattaaagccttcagaagcagcgtgccccattgcccactagtgcgccgtgaagtctggtgttcacctacagggtccctctcagcactgcccaggcctcccgagtgctccagcacagtagcttggagcttgttggtttggtgaccaagatacactccagggaatatgccatgcagtggagtctcttccccggcactgcatagcaaaaggaaagggccgctgggtgtctgtgggtcctgggcagtcacagaagccaccgcgctggcggggaggagggggaccgatgcggtccatgtcccgggcagccccaccttctctgcctgcgaagggcccttgtccggcgggaggagagaggcgcgccccacccgggctcctctacacctgccgccgcctgggccgattccgcgggcctcgcccggcgcttcagccgattcccgcccagctccgggctcatgggcgcggtcagcagggcgggccagggcggcggggcgcgacactgggaggaagtgcgggccgcctgcccgggcgcgttaaggaagttgcccaaaatgaggaagagccgcgggcccggcggctgaggccaccccggcggcggctggagagcgaggaggagcgggtggccccgcgctgcgcccgccctcgcctcacctggcgcaggtaggtgtggccgcgtcccctacccggccgggactttctggtaaggagaggaggttacggggaacgacgcgctgctttcatgccctttcttgttctaccttcatcggccgaggtaaaagtgctgaaaccatgtgaataaaatacaggtgggttccgccagcttcgctcctgaacctacccgcgctcgggatccagaagctgcgccgggagagaggggctcaggcctgggcggaggggacggaggtcagaccgtgcggaaagtgacccgggcaccccagggcgcccaggcccccagggagcgcggaaagtgcggtcgcggcccggccctcgggagacgcgggattgggatcaggcacagcgcgaggaagtcgatcttggagctagaacattttcctttggccatttacacgaatccactggaaaatgccgcagtgtttatcaaagttactcaaagtagaaatgtccagacgtcttatgagcttagacaaatcttttactacaaaaagaaacagcagttgcattcaaacaacaacccttctgaaccactactaaaatttagcataattactcttgtggatacattttcattgtcaagtaatttacttagccaatgaacttggagagcaagaaagttttatgtagtaaaatgtaaatttgagttaagagttaagggtgtttctttttgtctgtttgtctgtttttggcaatgtggctccaaaaccttaagcccacctaaaaactatataaatgcaatccattcttttgttggaatgttcaaggactagaaagacaattggagaagtgagagtttgaatctttttttacgttggaaacagtgttgcaaaatattttttgagttttgcctgacttagcaaagattcagtcgaactcaagtagagttcaaagcattgcagcgtgtagtaaaaaaaaaaaagagttgaagatgttgtgccatatctgattcttggtattaaaaataaaaaaaggaaccatttaatccctaagagttcctggaagaaatggaattgattctaccatctgacttctttgtcttagt

SEQ ID NO: 61 - DNA, 2424 bp, Homo Sapiens
taaaaataacatagtaatccttcagatttgtagaatgctttcctgtttacaagtttgttctatacacattatgtcttttaaatgacacactagccttctgagggtaacttatattggcaacagttttcagatgtggaaactgtgaagacaatgttggtgatgtggaagcaacataaactttggagtctttcagacccaggtttgaatgtcagactgctttttattcagagtaacttcagagcattatttctcaccttaattttttttcaggcctctttgtgtctatgtgtcctcttcactcctgtccattgttcattcagtgatttttgcaccttccttcactgttagtgtgtagacacatagttctcctggctctgagacctatgttaattccattctaccatcctgccagcccactcaattcctattgagcaatgctagttgaaagttgtggtgggattaaatgttgcaatgagtattcaaatgaggttgaagtatctacgcattctacttacatatggtgaggtatattcaaggaaggctgtagccattaaaatctcaggaaataatttttcacctcctcaggtgaaagggtcttcaggcctttgtgttctggaaggttcatttatagccatttcccaaatgacaatgcgattgatgagtctagagtctagctcaaatagcaatggactggaagactagtttaggttttactaatgtggaacatagaacaaattatgtccttgtttcagcctgttcatctgtgaaatagagcctatcatatccagtcttccttgcctttaggtttgagttaccttctttggtcaaggtaagtaaatgcctatgatgtttggctgtgcacaagataaagctacaacaaagctacaacccatcttttctctgtagaagactgcaaaaagcaaaagagacccaggcaaaaatctcggaatgacttttggaacagagagcctccccagaatcagaagtcaaaggaatttaaaacatagggaggcccagggtctctactgacataaaggaaagatgttttccttataggtttacgtttacattttctctctctttccattcccacttgcatctccacctttacacagggcttatgggacctcctccacaaaagagcagttgcagtaacccacatcatcctctacgcctggctgtccatcaagaggcgaaaagcagccctatataggttctatccttggatagttccagttgtaaagtttaaaatatgcgaaggcaacttggaaaagcaagcggctgcatacaaagcaaacgtttacagagctctggacaaaattgagcgcctatgtgtacatggcaagtgtttttagtgtttgtgtgtttacctgcttgtctgggtgattttgcctttgagagtctggatgagaaatgcatggttaaaggcaattccagacaggaagaaaggcagagaagagggtagaaatgacctctgattcttggggctgagggttcctagagcaaatggcacaatgccacgaggcccgatctatccctatgacggaatctaaggtttcagcaagtatctgctggcttggtcatggcttgctcctcagtttgtaggagactctcccactctcccatctgcgcgctcttatcagtcctgaaaagaacccctggcagccaggagcaggtattcctatcgtccttttcctccctccctcgcctccaccctgttggttttttagattgggctttggaaccaaatttggtgagtgctggcctccaggaaatctggagccctggcgcctaaaccttggtttaggaaagcaggagctattcaggaagcaggggtcctccagggctagagctagcctctcctgccctcgcccacgctgcgccagcacttgtttctccaaagccactaggcaggcgttagcgcgcggtgaggggaggggagaaaaggaaaggggaggggagggaaaaggaggtgggaaggcaaggaggccggcccggtgggggcgggacccgactcgcaaactgttgcatttgctctccacctcccagcgccccctccgagatcccggggagccagcttgctgggagagcgggacggtccggagcaagcccagaggcagaggaggcgacagagggaaaaagggccgagctagccgctccagtgctgtacaggagccgaagggacgcaccacgccagccccagcccggctccagcgacagccaacgcctcttgcagcgcggcggcttcgaagccgccgcccggagctgccctttcctcttcggtgaagtttttaaaagctgctaaagactcggaggaagcaaggaaagtgcctggtaggactgacggctgcctttgtcctcctcctctccaccccgcctccccccaccctgccttccccccctcccccgtcttctctcccgcag

SEQ ID NO: 62 - DNA, 2479 bp, Homo Sapiens
caaaggagccttcctccttcctaccttcctggcactctccctgccttccttctgtcactctcaggtggacccagacccaaggtccagatttgcaaggcaggaaaatgctgcaggcctaggctgggaaagggcccaaagccgctagtggattgctgggactcagcctcctccttcccactaagagagcgagtcctactgggttcaaaatgaccccaagccctggttcctgacactaggggaaagagatgggggtgacagaatcacagaatccctgctatgttcctccaagtgtgcccagagatgcgtgtgtgtgtgtgtgtgtatacacaaatgtctgcttatcctcaggcaggaagggtggatgcagtcatttacacatggtctgtttttctggaggacaattttatttgataaacaattgtttctatctgaatagaataaacaaggctctatgatgaagtaaaacactaaatacacatgcattaaaaaatgcataattatctttttggaatgggctatacagagatgtgctttttaaaatgttaagagtgtaaaaggacaaacagtgaaaaataaatcttcctcttattttgtcctccagtctcccaattcctctactcagaggtgagaacagaacttccacaccctccagaacctccacagttagaactgtctacatgtttccattgtctttacttttattcttgcctgcacaaataaatgaattgctcattatggaaacttcccaaaagacccgttaacacttcaataggaagcaccaacagtttatgccctaggactttgttcccacaatcctgtaacatcatatcacgacacctaacccaatccttatcaagccctgtcaaaaacggactttaaaccaagctgcaaattttcagtaatctggccttgcctttccccctctgatagcaccatcaaacaaacccccttactgccgaaagcaataagcccggctttgttccatccactggttgtgttggtgatatctggggactgccactgaacagacgcacagagggagcccctacaggcaggggtttttctgtctgtgcttctgggagagtatgtctcgtacatttgtcgcgttgatgaagacttcacagctccatcagctgcgggcaagggggtctgaggcagtcttaggcaagttggggcccagcggggagaagttgcagaagaactgattagaggaccccaggaggcttcagagctgggcgaggtagagagtctcctgtgcgccttctctcctctctgcaattcggggactccttgcactggggcaggcccccggccaggtgcatgggaggaagcacggagaatttacaagcctctcgattcctcagtccagacgctgttgggtcccctccgctggagatcgcgcttcccccaaatctttgtgagcgttgcggaagcacgcggggtccgggtcgctgagcgctgcaagacaggggagggagccgggcgggagagggaggggcggcgccggggcgggccctgatatagagcaggcgccgcgggtcgcagcacagtgcggagaccgcagccccggagcccgggccagggtccacctgtccccgcagcgccggctcgcgccctcctgccgcagccaccggtgagtgccgcggtcctgagatccccgggccggatgcgcggcggccccagctcccgagcgtctgcctcccccgccctgggctgcccgggctccctgggctccccggcggctgcacggagtcaaggcgccccgtcccgggcgtcccccgcgggtgccgatccaggctgcccggagtccggagcccagagaggagagagacagctggggagcctggtcaccgcgggcatctcccctgcgctgcagtcgcccgcctggcctgccttcccgttcctccgcctcttgccctgacttctccttcctttgcagagccgccgtctagcgccccgacctcgccaccatgagagccctgctggcgcgcctgcttctctgcgtcctggtcgtgagcgactccaaagtgagtgcgctcttgctttgactgatgctgcccaaggacctctgatcagcaccaggggagaggaggggctgctcagggagctggggtcctccggattccatccacagcagggccagactctccccaggaaatgggacagggtggcagcggaggcttgagaaccacgggggttggcactggctggcaagggaggaagaggccgccgggactgccccagcctgcgggcatctggtagatgaagcttgcttgggtcaatccatttctcctggctggaaacccatggtcttccatttgagaactagatacgaacagggtgaggcgagagggagagggaagagtgggttttgggattggggccagtttaccctcaccctggagtccctggagcatgggacctttgatgaagcctcctcccgaatctcttccagggcagcaatgaacttcatcaagtt

SEQ ID NO: 63 - DNA, 2484 bp, Homo Sapiens
ggtagtccctggcaccttggactgcgaactgaaagggacccttgaagacaccaatccgaatacaacctcaaaaattccccagtctccactgtctctttgatgaattttgtacaaagacaggagttttcaggagatactttgtgaaagttacagcagaagggaagctgaagtttgaaaacacattacattttgtcccttggttctcaaaccccctcagttaaaaatctaggcaaaattattatatccaatacagtaaccatctgtaaaacttcagaacagtaaacaaaggacataaagaaatgtatcttcatctcccttaaatcgaaaacaagcaaaacactacagaatcagattttgctccattatataggaattgtctggcaaagatccctctttttttcctaaaggtgaaatttcaggctgctgaacattgaatgggtaaagatttttacaatgctgtatctaagtgagcactaatgacttcacctactaataacgactacttcttgggaataagaatttactaggaagcaatttttaaaactttacaaaggatccaattggtccctacaacatggccagtagtcacatgtaaattctatctggaagattggggtgaaattaaggggttggtgaaggaatccaggaaaattaaaacattaaatccatttttaatagctgacaatgctatgcctcaagagaagaaaaagagtatattctgctacagtgtgtgagaaacccaatttttgtttttggatgatggtggtatgtcacttcccttaaagttaggcaccagtgtgagtagtgtcccagagaggtgaacgtgtagctgtgtcagacatttatagccccattcttaaaagacacatgggaaaacagtcaaaagtcctcccataactgcaccaatttgaccaataggaaaacaagtggaaaatgcagtttcaccaaagcagagtagaggttccttttcatcaaaccctcaggagggggaggggagaacacagaatggccagggggtactttctggaagccgaagagagattaaatgatgactcttacatcccccccgctgtttaagtgctgaaactaattcagatcccactttctccttcatgttaactctggattccccgagtaatttggagcctatgctccaggtttcctgaagattagaagctcaagaagatgggaatttttagaacaataactaggggaaactgtttacttgaagggccaagggtagggggctgcgtttggtattttactgagaccccgtccattgaaaacattgtttctaacgaaatcacccagcaccttgctctatttgcgtggctgttttccttacagtggtgtaacttgtgttagctgattgtctttaggattgttgtaaatcttctgatgagcagcacttagaaggggctttagtaaaaaccatgcgccccaaatttctaaagcttcgtttgggagagaggttgacatttgcacatgaagtctgtcttttggaaacagcaggaggacgcaggaggggcgaagtaaccccgggaagacgttcttccccctcccttacggattcagtgtagttcctggcataagcaattctgtcaccgggcggtcttttctaattcgtgtgggggctgatattaacataagcagccgcctcttcgggtgcgagtgggatcccaggtccgggatgtggtgggtgcggtgcgggagaggcacccgccgcccccttcactcggatgttagaggcaagttgttcgtgtgaactcgagcgaacgactggaggttggctgttgtaggttcactccttcaggatgtgggtttcagggggcgttttgatgtgatttaattccgaccgtgaaaacaattgctaggggctggctggattgctgttggtttttcccctcctggtggctttgcttggtttgggtttagtttgggaacaaacttgttttatatcaacacttccttctacatcgggcgccgtcgcctcaactgcgcgtggggggcgaggcgcccaccccgcacaagaacagaggagcgggggagaagagacggcctcgctgctcactgggtaagcggagcccagccccgctcgggagcgggcaggagagacagggtagtgacccccactcacaccagaaaacccctccccccggcgattttgctgccaactcgagtcggctacagacagtccagtgagtccttaattacaaggacgagagaaaagcacggtgcccctcgagtcctctccgccccctcggtcctaacccccgcccaggctccaggtcttcccctttgtgtggcctggactctctcccagctacgactttggtgggatccaaaaggaaggaggtggcggggcctacggaagaggatacccaggagccagggagaagggctagaaaacgaataatgtgactccagaggcggaaccccgaccccctctatttcccaccccggcttcacccggagacgaaagct

SEQ ID NO: 64 - DNA, 2487 bp, Homo Sapiens
acaccgcaactgtgggccccggtccccacgtgtgccgcgctggacatcagtgtcatggtccaaacctcccacagcttcccagccttctctgttgtggccttcagagccctggagagccagttgttctgctctgacctgggtcaccaggtcctgtccctctacgaggtgcgtggggccaacatccatgctgggcctccagttcagaatgaaaatccactcttaaagaatctgctttaagaatccgatgaagcaagcactggctccctctctgcccccaatgtgcagcggcgccagtgcccagcagccttgaccaagcggtcccgagtacaagcggcgccttcaccgggaaagataggtacttggcagccggtggcccctcttaccccgcccgtatctcccagtgaccccctcctcaccaaaacggcaccctgggagccgcggagcgccacggtgacccttccaactgcctctggagtccaaatccgaaccggtccgcggccctgagtaccaccctacacaccccagccttggctcctcagagccttgcctctgcgtggctcttcctcgccgctgagccacaactcccttccattcctctctttcctcggcgctggctggtgcgggttggggtcaggtggagaagccgctctttgttaaggtgacagaacgtgctgggggtgggggccggggccagggccggtgcaactagggggccgctgccctttcctggacacagtggaagcttcttccgcatcaccaaatttttgtcatcctttctgagggacctgcttccaggcagcacgcaagttgttgtcccgggtttactccgcacccctctactgggtgaggaaggagcatcttgaatggagatgggggtgtccccggtttatacatctgcagagaagaggtgtgccgggctgcacctctggaggccgcggtaactgatattagagaagaccccggttgcagctgggaaggctcactggctggaaagaggtgcctcctccttccagcaaagggccctgtttggaagggctgcttctcacctgtctagtggcaccacaggacggtcggcttccactcgaattcccccggacggtatcatcacatagccgggtcctcgcagtgttggtttcccaatccgatgactgtcacctcggtgaggacctgtgctgatggccggagaaccctgcgctgcgggcgcacatggccaggtggcgcctggcaggcgacgtccgggtgcaggacggcgctcttaccgccccaccccaaaccgttgcctgggcctaggtccttcggcttcctgaacaggggtttggggggctaaggacgctgaggctccgggggcaggaagttctctctggttaagcgttctctcttctctccggcatacactcccctacccacccacctcgcctaccctcggggcgagaggctcaccaaggcagggcgcgccccccccatgaatcatcccaaggcctctgagccgcgggggctccgggcaactatccccctcctctcctggcctcaggcaccccagtccaggggtctgcagagaagcccgaagcccggacaaacgcgccggacgtcaacaacctctcatccctggcagcagcaaaggccaatatatttccatttcttatttcagtttgccaccaaaacaaagctgcgcgcggctgagggcaggaaggcgctgagaccgagaagaagggacgtcccggagaaagtgcgcccagctgatcttagaaaccagagtcctccgggacttcgccgagattttctgtagggcgttttaatctgttttcctactgcgtgccggcgtcgcagcgcgtgcggctcagggcttggtgactccggcttagcccggcggtcgcggcgaggttcctggcgcagccgcttggaacttcgcattagaatcgggaccgcgcaaatgccctggctgaagtgtcaccctattcaagaaacactgctgtcaggaacaaaatggggtccccggtgctccgaagtatcttctgaaattttcttaaaacaacttacaaaaaatgtttttgctttaacgttttacaacgtttaaggaaacatgtaaatggtctgtttctttatcgagatggtcgtcctaactaacagtgtacacatacataacaattcttccaactttcctcctcagagctaagcacttcactatatgtaaattataataaagaaaagattgtgcaagatcatgcaagtcgattgacttaaaatattgagttttaatccaggccctctgtttttctatttaacaacttttgtgtttggaccagactggtgaagcaggctatggaaattaacaaagtaaaaaattaaaagcatcttccttcgccatccctccctccaaaattaaacaacagtcgccccttcctgagcaggcttcagtcccaggctcgagttttcctgcgatcaccccacagtcacccacagcagctgttgctgcttctgtcgggtttt

SEQ ID NO: 65 - DNA, 2491 bp, Homo Sapiens
ttcatttaaaaactttaagtttaggccgggcacagtggctcacgcatgtaatcccagtacttggagggaccgaggtgggcggatcacaaggtcaggagattgagaccatcctggccagcatggtgaaaccccgtctctactaaaaatacaaaacttagctgggcatgatggcacgtgcctgtagtcccagctacttgggaggctgaggcaggagaatcgcttgaacccgggaggtggaggttgcagtgagcggagattgcaccactgcactcgcctggtgacagagcaagactctatctcaaaaaacaaacaaagaaaacttgaagtatagtatccttttaaattttaaatagataatagaaactggtttccccccatttaaaccagaatttaagtttaactttatatattcttgacagtttggattttgtccttcaacctcataaaattgggaatttaagcatcacctggttcgatttaaatgcaatgtagaatttgcattaaaatactacattaaagcctcagatttgtagtagctaacagcacttctatgtatgtgtcagggactgctctaaatacttcatatatattaactcctctattctgtacttctgttcccgttttatacagcaggaaattgaaacactgagaggttaagtaactaaagttacagagctagagtgacaggagtaaagcttcaactcaggcaacccagacttccagagttctgatctccactactaagctgctagcatagcttttctggtaactatttttaattcaaatataattcgagtgatctatctaacaagtcatcactctgacaactcagtgacttgtaatgtaaaattattcattgtaattcatttaatattattgtttctctgtgctgcaaaaatcatagcaatcgagatgtaatttattactctccctcccacctccggcatcttgtgctaatccttctgccctgcggacctcccccgactctttactatgcgtgtcaactgccatcaacttccttgcttgctggggactggggccgcgagggcatacccccgaggggtacggggctagggctaggcaggctgtgcggttgggcggggccctgtgccccactgcggagtgcgggtcgggaagcggagagagaagcagctgtgtaatccgctggatgcggaccagggcgctccccattcccgtcgggagcccgccgattggctgggtgtgggcgcacgtgaccgacatgtggctgtattggtgcagcccgccagggtgtcactggagacagaatggaggtgctgccggactcggaaatggggtaggtgctggagccaccatggccaggcttgctgcggggggaggggggaaggtggttttccctcgcactgtcttaaaccgatggcctttccttggcacagggtccactgcagcatgccaaacgaggaggcaggggcgtcgtccccccgccccccactgcagcactggagatggatttcctgtacttcggatccagggtttttgacagaagaggaagaagggggaggggtagaagtgttaaggggagtctgctgagaaaagctgtttttgaagccagaaggggtttttgtttttataatgccatttgacagagtggaataacagtatctaaggaaacgggtagaggacaacaaagaatggagcatattcatggcgaggagcaaaagctctaccccattgaaaggcttcttttcctccctggcgacaaggacacatgcattggtggccaaaagagagaggagacaaaaccgctgcagatggctgatgtgaatctagtggaaagagctactggggatgagagaaagaggaggaggcaggtactgcagagcgtgagtggtggtgttggttggtgaaatactggtcaccagtagtgtgcctgcttttgtaaaacatctaagtaaactccctgtgaacagggtggcaaacagataccagtgtctttgttagttacaaaatgcagtggtagtggctttttgcggacgactgcagcagtgctttttctccctctgttaggccgaaaagacaactgcagaggaataagaaaccttgcagcaaatgctggggtagaagcccatttacaagaagccatagtttataaatgcagcctgaacagcagaaaaaaaattactgttttttaaagtaggaataatgtcaggctatgaatgttttgtcattggaatgtattggacactttgattctacatcacgaaagtgatgctcaaattctttgatttaacataaatcctatacgaaatcttaataaattatgtatgaaacagtggatcttttcttttgttagtgaagcttttatgccattaattaggtcattcaagagcaaaccactttacaacgtaaattactttgtcaaaaattatggtgaacaaatttttgtaggcctaatatttaagacctatagttaagtaattttatatttctctttggttgcttttagataaca

SEQ ID NO: 66 - DNA, 2425 bp, Homo Sapiens
gttttagaataatacaaaccaaagaactaatgacaacgtcctttatttttaaagattctagaagttgctttttgtaattagacaacataaattctgaattttttcacatattgctgccaaccccttgggtcttttcctttctccaagaaagagaaagctacagaggagtgactgaccgggtaggtggtggtagccttagctttctccaatgtttctggttgttttctttttcttgcataaaaccaaaatcaacaacgaccaaaccaacaccaatcaaggcctccccgcccctaacctttcccagtgacctgctctcatctctggatcctcctcaagcacatccctgccggcagcatctgttactactgacgctcctctacttccctcttgcgctttctcaatggcgcaaatggatccagttcttaagttctccctcccacaaaatcctgtctcctccccttcccagacatattcctggcacctcttcttccacaaggtcccatcctctcatacataccagccggtgttttttgttttgttttgttttgttttgttttgagacagtctcgctctgtcgcccaggctggagtgcaatggcgcgatctcggctcactgcaacctccgcctcccgggttctagcgattctcctgcctcagcctcctgagtagctggagcggcaccacgcccggctaatttttgtatttttagtagagacggagtttcaccacgttggtcaggctggtctggaactcctgacctcatgaccagccgacgtttttaaagacatagtgtccccctcaaggcatattccagttcctatcacgaggattcccccacggacactcagtgcccccttcctgatcctcagcgcttccctcgcgacctacaaactgcccccctccccagggttcacaacgccttacgcctctcaggttccgcccctaccccccgtcaaagaatacccatctgtcagcttcggaaatccactctcccacgccagtaccccagagcatcacttgggccccctgtccctttcccgggactctactacctttacccagagcagagggtgaaggcctcctgagcgcaggggcccagttatctgagaaaccccacagcctgtcccccgtccaggaagtctcagcgagctcacgccgcgcagtcgcagttttaatttatctgtaattcccgcgcttttccgttgccacggaaaccaaggggctaccgctaagcagcagcctctcagaatacgaaatcaaggtacaatcagaggatgggagggacagaaagagccaagcgtctctcggggctctggattggccacccagtctgcccccggatgacgtaaaaggaaagagacggaagaggaagaattctacctgagtttgccataaagtgcctgccctctagcctctactcttccagttgcggcttattgcatcacagtaattgctgtacgaaggtcagaatcgctacctattgtccaaagcagtcgtaagaagaggtcccaatcccccactctttccgccctaatggaggtctccagtttcggtaaatataagtaataaggattgttgggggggtggagggaaataattatttccagcatgcgttgcggaatgaaaggtcttcgccacagtgttccttagaaactgtagtcttatggagaggaacatccaataccagagcgggcacaattctcacggaaatccagtggatagattggagacctgtgcgcgcttgtacttgtcaacagttatggactggagtgttatgttttcgtattttgaaagcagaaactaggccttaaaaagatacgtacaactctttagggagactacaattcccatccagccccaggagtctggggcaagtagtcttgtaaggtcagtggcctgcggggacgcagtgagcgccgaatttgcctggggcaggggaaatgcgctctggcccatgtctgcgcactcgtagttccacccctcagccccagtgtttgttatttttcgggttcagcttgcttttgccccgtctccgtcgacgcaatcgccaccagtcaatggggtggtcgttttgagggacaagtggtaagagccaatcttcttggcgaaaacgcggagaaacgggactagttactgtctttgtccgccatgttagattcaccccacagagatagcggcagagctggcagcggacggtctttgcattgccgcctccccagggggcgggaagctggtaaggaagcagcctgggttagctaggggtggggtcacgtcacactaagagggtttggagaagttcaagggaggaatcctgcaaagaagaggggcgactttttccgtgtctccggacagctaatcgttttagtgacaggatgagagagcccttcgtgttctgagggaccgagtgggcgaaaagcgccggagag

SEQ ID NO: 67 - DNA, 2452 bp, Homo Sapiens
agagatttccagactctgagcagcctgagatgtcagtaattgtagctgctccaagcctgggttctgttttttagtgggatttctgttcagatgaacaatccatcctctgcaattttttaaaagcaaaactgcaaatgtttcaggcacagaaaggaggcaaaggtgaagtccaggggaggtcaggggtgtgaggtagatgggagcggatagacacatcactcatttctgtgtctgtcagaagaaccagtagacacttccagaattgtcctttatttatgtcatctccataaaccatctgcaaatgagggttatttggcatttttgtcattttggagccacagaaataaaggatgacaagcagagagccccgggcaggaggcaaaagtcctgtgttccaactatagtcatttctttgctgcatgatctgagttaggtcaccagacttctctgagccccagtttccccagcagtgtatacgggctatgtggggagtattcaggagacagacaactcactcgtcaaatcctccccttcctggccaacaaagctgctgcaaccacagggatttcttctgttcaggtgagtgtagggtgtagggagattggttcaatgtccaattcttctgtttccctggagatcaggttgcccttttttggtagtctctccaattccctccttcccggaagcatgtgacaatcaacaactttgtatacttaagttcagtggacctcaatttcctcatctgtgaaataaacgggactgaaaaatcattctggcctcaagatgctttgttggggtgtctaggtgctccaggtgcttctgggagaggtgacctagtgagggatcagtgggaatagaggtgatattgtggggcttttctggaaattgcagagaggtgcatcgtttttataatttatgaatttttatgtattaatgtcatcctcctgatcttttcagctgcattgggtaaatccttgcctgccagagtgggtcagcggtgagccagaaagggggctcattctaacagtgctgtgtcctcctggagagtgccaactcattctccaagtaaaaaaagccagatttgtggctcacttcgtggggaaatgtgtccagcgcaccaacgcaggcgagggactgggggaggagggaagtgccctcctgcagcacgcgaggttccgggaccggctggcctgctggaactcggccaggctcagctggctcggcgctgggcagccaggagcctgggccccggggagggcggtcccgggcggcgcggtgggccgagcgcgggtcccgcctccttgaggcgggcccgggcggggcggttgtatatcagggccgcgctgagctgcgccagctgaggtgtgagcagctgccgaagtcagttccttgtggagccggagctgggcgcggattcgccgaggcaccgaggcactcagaggaggtgagagagcggcggcagacaacaggggaccccgggccggcggcccagagccgagccaagcgtgcccgcgtgtgtccctgcgtgtccgcgaggatgcgtgttcgcgggtgtgtgctgcgttcacaggtgtttctgcggcaggtgaatgacgggcgtgggtcggtgcgcgctcggcttgcgcacacggtgtctctaagtgcgcgggtgacgagagtcgggatgtgccggagaccccggggcggagagcgggattacaagtacaggaatccctggtcacgctccccgcccctggaaacccagctggggcgagggagggcgtggacgggaccgttctgggagctcgcctttggctgcggttggctccaggccccaggcgcagtttgctcgcggcgtggggatgaagtccgtgtccctggaggggcccaggaagggcgaggaaagcggagtggagtaagttcgtctaggatcggtcccgggtggctctgggatccaatctgcgccgccctggcccaggtcccaggttcaggtcctttacgccactgtgtccaccacctggctgagcgctgaggtcagcgcgggctgtttcctggcccttgggaatgtgccaggacccgtcccctaaggactagcgaggaggtgactcactgtgacaaggagaccccagggaacggactgtatgaggtcagaaccccgcccgggatggggtacagcgggactccagaagccctctcccctgccccttcgcggtctccgtcctcccatcggcacagtgacctatttggctggaacagtttgttcccaaggaagccgggcactggaggtccgggacaccgcgtcgggtccccgctccgcggcgcgctgtaggggtcggggagtcacggccctgctctgggcgggctctaaccagcctgtcagtcggggaagggcaagggtctcctctacctctttcccaccgcggccgggagaatcgcggcccagcctgtcctcgggtcggggcgctggactccg

SEQ ID NO: 68 - DNA, 2353 bp, Homo Sapiens
tacagctggataatagaatttttaagaagcatccttccacacctcctcacctatgaccttccctccacttgctccactgatgcctaaaattctgtttttggagttcacttagtttatgactttgattctggttaacattaaaatacccaggacatgggggaggggaagctgttatcaatcttagtttagtcagttaatatagcgagttgctcttattcattactcaacaagcacttattgactgcatactgtacatcaggtctgtaccaagctttggtgttataaaaatgaatgaagtttggcacttacctttaacattgttgtagtcacatataggagaatgtaagagattattatgaaacaatgtagtaaatgtacaatagggaattctagataagcacagcagagaagcaaccagctccgtttcaggtcctttcctgagactgattcggctggaagggagtaggtcccgccaaatgaagaagctgtgggaagacaggaggacaagaacaggctccacgaagagatttcagagcagagctgcgtactcctttttctttttgtttcttttgctctgtcacccaggctgaagtacagtggttagctcacggctcactgcagctttgacctcccaggctcaagtgatcctctcgtctcagctttccaagtaactgggaccacaggcatgcatcaccacactaggctattgttttacattttttgtagagatggggtctcaccatgttgcccaggttggtctcaaactcctgggctcaagcaatccgctcacgtcaacctccccaaatgctgggattacaggcgtgagccaccgcgccaggcctgagtaatcctaatcacaggattttaaaaagaaacttcctgcgccacccattaaacaatatctcctaccaatttggtagtaaatattttgctaatagtacctaatttttaggtaggcactgtgtttatacatatatccattccttcttttttgattgtctttctgtttaatgggcagctacctctcttggcatctagcagaatgagctgctgcagtttacacaaaaagaatggagatcagagtactttttgtgccaccaacgtgtctgagaaatttgtagtgttactatcatcacacattacttttatttcatcgaatatttcaccttccggtcctgcgtgggccgagaggattgccgtacgcatgtctgtacgtatgcatgtaactcacagccccttcctgcccgaacatgttggaggccttttggaagctgtgcagacaacagtaacttcagcctgaatcatttctttcaattgtggacaagctgccaagaggcttgagtaggagaggagtgccgccgaggcggggcggggcggggcgtggagctgggctggcagtgggcgtggcggtgctgcccaggtgagccaccgctgcttctgcccagacacggtcgcctccacatccaggtctttgtgctcctcgcttgcctgttccttttccacgcattttccaggataactgtgactccaggtaagcaaggtggggtagcagggctggtgacttccttttttcagggaaattcataaatatcgttatttgagctgatttgagatggtgaacaaaatggacttaggtccattttggggctgttttcaaagacgggctgttgggttgagtactgtcgcctctcatcccccatgttggcagtatttccagctcccaaccctttgagcaccaggaacactgcagagggagtaaaatcacttaaccatacaaggtaagaatatgaagaagtcacgtggctcggaggttttggtggtagaggggtgcaaccgtgattcacggaggagaaaatacttctgaggacattttcaggcctactttggaactcagaatgaattttgcaatgctagtttcagaaagggtgtggtacccgcaaactggggaaagttgagaagtattggtgggtctggctggctcttctccctggctgacgttgtaaggctgagatttaggcatatggactgcccttctttttggcatttttaagcatcagatcgctgttcatctacttgcaactgcattcttctaagcggaaattattctcccttcagttttctgggtttcagcataactttaaacaagttacacatttcagatgcatattcttggacttataaattgtaatagctgcttgtagtttcttactcatatgctgtacactttttcttatggcttcatttaagcatatcatactaaaaaccaacatgccaggctattccagagacttgtaaccagatcctcagagctgggggctcttagacatatttcagcccagccccctcattctgt

SEQ ID NO: 69 - DNA, 2489 bp, Homo Sapiens
tcagacagagagcagtctgagtcaggcaggaaagtgggacagccggggagctggaccccaccctctgtgagccccgctggtacctgatggcatgtggcttggagagggcaggtgacctggcgtggagggccagagggtaaatcctcaaacaagtggcaacaggccaccaacttgaaagggaaaattgtgtagtgatgggaaatgtgtccaacaaacctactgggtgactaattacaaaggctgggctggagcttcagaggctgcttgttaaacacttcattaagcggcactctgaaagctgccacctgcgcattctgggagctcagaggggaccctgagggggaatgaggcctggaggatggaaccatcttcaggtagactgagaaggagcctggatctcacttccaaacacagtctggagctcataggtcagaggcctcaatgggagaaaagctaaaggaagagggtgcagaaaggagtttcagggaattggtggctatgtgactttgagcaaatctcacccctctctgagacttagtgttcccatctctatggtcctgtgtgtgtcacagagacatggtggggattaaattcgatcgtgaatatgaaagtgcttgggaaactccatggccctacctaaacatgagttatcctcacctgaaccaaggggggaagttacctggcaggattaggaaccccatcctcctgaacctttatgggctctgtcgaggctgaagcagccaggggctaaagccgtccttagcccctggaagggcactgtgaaagtggatctgatttgagaagccgtttcctgatgtgggcagccatgtgatgccagccccgaacaagagggggcagcctggagcctggaaaggtgccagtgcaggtggggcccacgcccagatttctcctgctgactgttctgatgattcacccccacatcccagcctttttacctttactgcagagccggaaagggtgtggggaagagaggagagggaggcaggtcttgggccctggtcccgccccctgctcctccccacccttctctgggcctggccacccagccaaaaggcaggccaagagcaggagagacacagagtccggcattggtcccaggcagcagttagcccgccgcccgcctgtgtgtccccagagccatggagagagccagtctgatccagaaggccaagctggcagagcaggccgaacgctatgaggacatggcagccttcatgaaaggcgccgtggagaagggcgaggagctctcctgcgaagagcgaaacctgctctcagtagcctataagaacgtggtgggcggccagagggctgcctggagggtgctgtccagtattgagcagaaaagcaacgaggagggctcggaggagaaggggcccgaggtgcgtgagtaccgggagaaggtggagactgagctccagggcgtgtgcgacaccgtgctgggcctgctggacagccacctcatcaaggaggccggggacgccgagagccgggtcttctacctgaagatgaagggtgactactaccgctacctggccgaggtggccaccggtgacgacaagaagcgcatcattgactcagcccggtcagcctaccaggaggccatggacatcagcaagaaggagatgccgcccaccaaccccatccgcctgggcctggccctgaacttttccgtcttccactacgagatcgccaacagccccgaggaggccatctctctggccaagaccactttcgacgaggccatggctgatctgcacaccctcagcgaggactcctacaaagacagcaccctcatcatgcagctgctgcgagacaacctgacactgtggacggccgacaacgccggggaagaggggggcgaggctccccaggagccccagagctgagtgttgcccgccaccgccccgccctgccccctccagtcccccaccctgccgagaggactagtatggggtgggaggccccacccttctcccctaggcgctgttcttgctccaaagggctccgtggagagggactggcagagctgaggccacctggggctggggatcccactcttcttgcagctgttgagcgcacctaaccactggtcatgcccccacccctgctctccgcacccgcttcctcccgaccccaggaccaggctacttctcccctcctcttgcctccctcctgcccctgctgcctctgatcgtaggaattgaggagtgtcccgccttgtggctgagaactggacagtggcaggggctggagatgggtgtgtgtgtgtgtgtgtgtgtgtgtgtgtgtgtgcgcgcgcgccagtgcaagaccgagattgagggaaagcatgtctgctgggtgtgaccatgtttcctctcaataaagttcccctgtgacactcctcctgtctctcttccagttcttggcgatgggctgggagtgggactggaatctgacttagagaccctgactttggacctctgagt

SEQ ID NO: 70 - DNA, 2407 bp, Homo Sapiens
ccatctatttctttaacacacactaattgctgtctccatgttccaggccctgtgccagatgctagaaatacatccccatccactggatcttggcatggtccattgctcagtgtcctgctatgttacgtgttacataatgcatttattccggtatttagcccatggaaaataatgctgaaagacattgtatgcatgtttctacaacaaaactatgtaacttatgtttcttttattgctttggctatcaggaagctcttatccaaatcagagcaaatacattagaatttgggcttgtcatttcagtttgctgaacttttccttctggcccagattttctattttggttcataaattctattgcacaaatgtcctttattgtaaaacaccttaaattctttctaagggaaggctgcatggaaatgatacagtaaggtcttccctgcattttcttagattcctattagggaaggcagacctagatgtccctcttaccctcagtcccaaagccccccatttataaaatcccttaagcagtgactactgctgttctgagtacctggaggtagttcagagcttctgaaaggtaacatccatatacaaaaagaagttccttccgatccagatcccagctttggtgccagatgcacatttgaggagtaggtggctagtcagactctcacctgagcagttaataaaatctattgccccttaatggaattttttctgcaagctcgaattgatctgtcatctttgtgatttgtgagatggcagggaagcaccaaacaccatcatgacttgggccacagtggggggaaaaaaggaaaaaagaaaaaaaaaatccactgccaagccttgccaggcgtagaaagggctggaactgctggggccattttatctgatttattggaaatagagtggatcttattaacattttaataaagagaatctttttgcactaggctggaagtggccgccagtcccccgtgcaattccattctctggaaaagtggaatcagctggcattgcccagcgtgatttgtgaggctgagccccaacagtccaaagaagcaaatgggatgccacctccgcggggctcgctcctcgcgaggtgctcaccccgtatctgccatgcaaaacgagggagcgttaggaaggaatccgtcttgtaaagccattggtcctggtcatcagcctctacccaatgctttcgtgatgctgctgctgatctatttgggaagttggctggctggcgaggcagagcctctcctcaaagcctggctcccacggaaaatatgctcagtgcagccgcgtgcatgaatgaaaacgccgccgggcgcttctagtcggacaaaatgcagccgagaactccgctcgttctgtgcgttctcctgtcccaggtagggaagaggggctgccgggcgcgctctgcgccccgtttctgcattcggatcgcccggcacgggcagggtgagggggctttcggggggtcggggcctccggtcgcggcggcgaagacagatcggggctcggtagggaggtcattccgagcccagagatcctaggcaccccccacacacaggctcccactctggcgtgcgtgtgtgtgtgtgtgtgtgtgtgtgtgtgtgtgtgtgtgtgtgtacgttcgttaacgggaggaggagagagctcccagtccttttttgctagcaggggcgacattctcgcccacatcaagtggggtaactttggttccctcctccggaggctcggtgcattggagaaagactcagttagaggcgactccaacgagccgcggttttccccagcccaacgcccagcggccgaagcgctgctcgggtccggattgcgggatgcggggctggagaggccgagcaggcaccaccgacttcccagggcgcccgggccccctggtacagcccggctgcccgctggaaggcgcctcggggcagcagagagcctcagcccggctgctgctgtcgctcaaaggcgccggcgccggccgcacccgcatcggggtccttttgctcccagaccccgggcccgaaagggccggagcgtgtcccccgccagggcgcaggccccagccccccgcacccctattgtccagccagctggagctccggccagatcccgggctgccgcctctgctgccttccctgagcgggagcggagcgcagagaaaagttcaagccttgcccacccgggctgcagctgcttgttaaccctcagagcgccacggcgcgagggaagggcacgccaaccaggagagggggcgagggagatgcggtccgcctgcagtcacctctgcacctcagagatttcgggaagtttgagtgcaggaaagcagcgctccgaggccaggcctggggtgctggccgctgcggggggcacgccctgcgctgct

SEQ ID NO: 71 - DNA, 2436 bp, Homo Sapiens
gtgaatccccatctctattaaaaatacaaaaattagccgggggtggtggtgggtgcctgtagtcccagctactcgggaggctgaggcaggagaatcacctgaactcaggaggtggaggttgcagtgagtcaagatcgcaccactgtactgttgcctgggcaacgcaccgagactccgtctcaaaaaaaaaaaaaaaatgagagaacaggggagggtctagggctcagagctttggagaacagacctcagtagcaccaacactccaggatcaatgctacaaagacacgggttacaactaaactggagaacatggccaaggatgggaactcagcctgagcagggctgagccgagcagggctaagccaagtagggctgagccagaacacttcctccttttttctgaacaatctacctacatttcagctacagggctggctttacccagtccggcgggagggaggagagggctggtctgtgacttcagtgctgaggtttgatcaaggcaaagggaaacttcctattcccagaccctttgcaagaaagaatggcatattacttgccaccgacaggggttattattactaaatggagtcagtataaatgctttccaataaagcatgtccagcgctcgggctttagtttgcacgtccatgaattgtctgccacatccctcttctgaatggttggaaattgggcatctgttcctttaaacaggaaacatttcttgttcgagtgagtcatctctgttctgctttaggagtaaagtttaccctgcagttccttctgtggtgaagttttctctttctctcggagaccagattctgcctttctgctggagggaagtgttttcacaggttctcctccttttatcttttgtgttttttttcaagccctgctgaatttgctagtcaactcaacaggaagtgaggccatggagggaggcagaagagccagggtggttattgaaagtaaaagaaacttcttcctgggagcctttcccacccccttccctgctgagcacgtggagttaggcaggttaggggactcggagactgcgatggtgccaggaaagggtggagcgggtgagtgcctgttgccaaggtggcctcttcaacaggaaaccacaatatttttgtttcttgacttgctctagaaacagggctgtgggggtggggaagcaacttggatctgcccttctgaggacacctctgggtgctgcctggcccaggtctcctgtgtggtttctctctgagccgttgcctctgactttgctactttttcactctgagcagtctccagttcctctgctacctttttgtcctccaagcttccctgccgcctcgaatgcagatacacggtctccctcctgtggacccgtttggagagtccagaagactttatcaatccacttttttttctttttcatttggccctggggccgacggttaagtactttattctgtcattctgtcgaatcacgatgccctgaggtgcacagccccttccccctcttccgtgtctgaagggtttccttttatctctccacccccacccttgccctcctgccctctctcttgttccccaaagacagttctctaatgttttgatgtggattcgtgaatttatctgtatctttgcaaaatgtatttttcttttgtatgtgtacactgttttttaactatgcgatctcaggcaagtaattcctctgtgcctctgttatctcatcattaaatgattaataatgcctccagaggtgactgtgaggcttgaaggagataatacgcatacatcacttactacacgagttagcaattattattgcatattaatactattggtattttattttgctcattctgtttctatttcttttttatttatttattttttgagacaaagtcttgctctgtcacccaggctgcagtgcagtggtgcaatcacggctcactgcagcctcaacatcctgggatcaagcaattttcccatctcagccttcagattagctgggaccacaggcgcgtgctaccacacctggctaattaaaaaatttttcttcatagagatggtgtctcattttgttgcccaggctggtctcaaactcctatgctcaagggatcctcccaccttggcctctcaaagtgctaggattacatgcatgagccacggtggccatccaggcattgatattatgaggccatcttgacctagccctctctggtgaagagtccttttcagatacttcgttcagtcttctcagctatgagtccctaccctctgaaagcttatattctatttggggaaagacaaaaggcagtttcaaagaagagaggtgtttgattttcttttcctacttttaatatcagaaaacatttcatctaactctcagtatgaaggcaatattttgtttactggtatatccctagagcccaacatggt

SEQ ID NO: 72 - DNA, 2481 bp, Homo Sapiens
acatgaccagcttcattttagaggtgaggagtctaaggcttagagaagtggggggacttggccaatgacacacagccagtgcatggggaagccaggattgaaagccggtctgactcagagctgggttgggtgccttccaagaaaggagacccttggtttggttccctcaaaaccacctccaggatgggaacggtggctcacacctgtaatcccagcactttgagaggccaaggcaggaggatcgcttgagcccaggagttcaagacctgcccggccaacatagtgagacccacatctctaccaaacaaaaacaaaaacaaaaacaaaacacaactagctgggtgtgatggcatgcacctgtagtcccagccactagggaggctgaggtggggaggtgggaggatcacgtgagcccgggaggctggatcactgagactgcagtgagctgcgatcgggccactgcactccagcctgggtgacgacagacccagaccctgtttcaaaagacaaaaaccaaaccaaaaaaaccacctcgattgccccactttgggagtcagacgtggatctgaatcccagctgcaccttcactggcagtgtgccctgggcaagtccctgcttctctgcccataaggtgagggctaaaaccccccactctgggagccctaagagaatctagttggaaggcagcccagctgaaggccaggcactggttaaaccccaggggaatccgatccaagtcacctccccctcccctcctccctctccgaggaaagtctcaccttctgccccttccgctcctagaaagaaagagaaagaggaggggtgagtagggaagactcgggttccctgaccccttagtacccaccactgctccagagggctggccccttccctgacagagccaaggtgggaaagagaggccaagagctagggaggccgggggttttcttgggccccagacaagggcacaccccagaaaatgatcacgccggctccctccagtgcattgtccccaccctgcccccacgtcctcacttacctgtccccgaccggagtaatccaagatagagcagaatggccacagcccccagctgcccaggccccaggacccccttctgggccatggcccaggacaagggcccctggggcagactccaggcacgcaaggtaggaagccttggggtggtgtcgaaggcaggacccagatgttggctcagagggaaggatcccagaatccgggctggaaaggggcagcaagtgtccaaggctggcctctaaggcagggagcggccgcaacgggagacgcctggagtatccgaagcgagcagtgtggacgagtcaccagcaccgtctggccacgcagggtcctcccaggagtggctgcacctacctgcccgcccctcccctggccccgcccactggctgggctccgccagctcctcttgccaccaaagtcatgagtcctttcagagctgcaggcccgtgtgtgtgcatgtatgtgtccgtgtgtatgtgtgtgcacatgcataggccttttgtgtgtgtgtcccggtgtgtagtgtgtatgtggtgtgtgtgtatgcctgtgtaggctgtgtgtgtcctcttatgtggtgtggtatgtgtgtgtgtgtgcatgtacaggctgtatgtgcacatgtgtaggctgtgtgtgtccctgtgtgtgtagtgtgtgtgtctgagtgtgcgtgcatgcacgtgcatgtggtttgtgtgtgtgtgcagtctccctggaatgtgacgactctcctccgcctcaggtctttcaggttatctcaggccagttatgccccccagggcctggccccagcttttattatctggagccacagccactcctcccttcttccctccctccttaggctggttatgggagcttaagacactatggtctgtcccctgccaggccctttctgcgatgcctgcacctcatgggtggtggcgagcttgtggagcagcaccaatcatcccacagacatttcctaagtgcctatgatgttcccaggtgtccaggacaaaacaggcaccagccccgtcccccttgagccctgagctcatggtgaagtaggggtgacacacttcaatcaaataatcacaaacaggctggcaaggtggctagtcggctttgggaggctgaggctggagcatcacttgaagccaggagttccagaccagcctggggaatatagcgaggcctcatctctacaaagaaatataaaaattaggcaggcattgtggcgcatgcctatggttccagctatttgggaggctgaggcaggaggattgcttgagcccaggagttcaacgaagcattgagctatgatcacgccactgcactccagcctgggcaacagagggagaccctgtcttaaaaaaaaaaattgcaattacacaataatttcaagctaggaatagtgatgaaaaagaatggcgtgagcacaccacagcctggcaaaggct

SEQ ID NO: 73 - DNA, 2444 bp, Homo Sapiens
cagaccccaggtgtcctggagctctgcagatcagagaggctagtactggaagcctgggcccatgcccccagcagcccccagcccagggggcccccaaggctgaacagcaagctcaggatcatcttggtggtggggcaggctcagctcacactcagccttggcaagtagctccagaaactgctagtgacgttgtcttcaagttaaatctcaggaggaaaagaaaatacgaggacaacaaagagaggaagtggcctgggccggcctacccggtgggtcttgtcctgccccccaactaccctggctggccccacaggggccgccaaccacacaagccagttcctgtccctgaggacttggctcagggactctgggaatgtggtagacatggggtggccccaccaaatgcatccttatgggaacctgctccctgggagccatgaaaagagcgtggacttcgaggtggggccacaggaagtggtcaggtccatctcaggggacctgctgcccatccacactgctggccaggaaatggggggcaattcatgcctcctcagcaccttcagcactgggcggctcaaagaagggaagggactattctggggtcacacagcatgcagccagaggccaaggcatgaggaagtccttcatttccccacccccacccacctcagatcctccaaccggtttcatggcagcccagggtccagcggcatccaggatgctggtgggtagctgcacagcccaggccgcgggaggttggctgctctcacctaacaggcctatgtggccctgacccctacctaggaagctggggacaatggccaaggcgcctcccctctctgtgcctgtctgtccaggtgcagcatagacacagcacccctggggccaagagcacccagccagggctgcccccatgggtgggcagggcagtaaatgaatgagggacaggttgggaggtggccagccccctccagcccatggagggcacggggcaggagagctgggctgagccagcaggagcccagggagcctggtctctgccttcctatcctggaggaaggtgaggctgaacctccttccctccctccctccctccccgcccccactgcacgcagggctggctgggctccagctggcctccgcatcaatatttcatcggcgtcaataggaggcatcggggacagccgctgcggcagcactcgagccagctcaagcccgcagctcgcagggagatccagctccgtcctgcctgcagcagcacaaccctgcacacccaccatggatgtcttcaagaagggcttctccatcgccaaggagggcgtggtgggtgcggtggaaaagaccaagcagggggtgacggaagcagctgagaagaccaaggagggggtcatgtatgtgggtaagtggggcatggcagggtgggacagtgtggtggccaaagggtgagtgcccagttaccttcgccagaccttactccccagccccagggaggcattttgggagggggcgaggccctggctatcaaggtggggtctccagaccctggagcacccacaatgccctgtgcacacctatgtgtgtttgtctttggcctcctcggggcctctgggtgtcagagaccgcagacagggctggctacctgtctgtgcacgcacacacacattcccaagcataccagcctcccctgagcctggagcccctgaagccatgagcagcctgtgctcaggtggcccccaccctctccacacgggagcggctacagccaggtcacggatcccctccctccccagagagaaggggcaggctgggggatgaaacctaggctcagtgttccctcccccgcatcctctcctggcactctccagaggaggaaggggaggtcaagccaatgactcagctctggcccatcctgtcctgttgctgcttctgaggcccggccacacccgggcaggggctggaccctgggtctagccagtgtccctacctcaggcctgctctctcttgtcccccacattctgtcctgtccccttcccatccatccacttcttccagacacagcaggaagaggccctctgaaggggccgccggcccccagacaccatccttacccccccaccgaccccacagtttgtccagctgttctgttgtgtttgtcctgaccgcccccaacacctcgagggaggtctgggctgacagctccatttcctccccaggagccaagaccaaggagaatgttgtacagagcgtgacctcaggtgagaagccccagggccaggggacacatgggggataggacccctggggctcctgcatcctagtgctggggctcaaacctagagtcctgccttacccccaactggggtcccaagccctacagacccctgcagaccatgaggctaaactagggtgggcgtctccttacccccaccagcatcagaggtgcc

SEQ ID NO: 74 - DNA, 2489 bp, Homo Sapiens
ggaagggttgaggttgtctttgaaccatccccttcccccatgctttacagcccccgggccccccattctcactccactctgcaccccgcgccaagccggggagagaaggtgtgggtgcagccatccctggggactctcattcacacttagccgggcaggggagaaggggctcacagatgccctcagccccttccctctcagccctgagtttcctctccacactccctccgcttcggatgtaggaagtggggggaggttgtcatggaaacgtttcccccctctgtggccaaggctactggggtgccttcggagatttaggggccaaccggtcggtgcccacacctacctgtggggatcagtgccgcggcggagaagagcaacagcagaagccggagccggagcccgggaggcgccgccgccgccgctgccgccgcacactgggatccgctcggcagcactacactcgccatgtcgggcacctgcctcagactggcggcgttggctgcctccggagcccgagcggacagctaatgagatgctaatgacatgcgctggaggcggagtccgggcagaccaatcacagcgccgcgagcccaacccggctctcggagggcctcgctccctcccccaccccgccccctggcgctggcgttcggcggcgcgcccgcgccacctaggggcggggccaaggggaggggcgtatgcaaatatgtttatgttaaaattcgggttttgctttccccggatcaaggaaaaagtgttctcccgggcgcctggcgtgcaaggactcgggctccagggggcgggtctagcttcttgtacacctttattaggaatgtttatagcaatcgctgtatcagaccgacgactggagaatctcccttaagagggtcctctgtcccgcacaccgagtgcatctggcctagcgaaccagacgttgcaaatttccgtcactcaccttgcaccgaaggaatagatctttgggaacgggggctgtgcgggagtggagagtaagaaggcaggtccccggattgacaaaacaatctgggagaagtgcatgcgtgctttgcacgtccggcggagcgggagagcccgctcaacagcctagcggtagactcggggatagttggagaaggcagccgtagagtcgggttctgagattttccagtcggtctttttgcggcagaatctcgggaaaggtagatcgaggagggtatgctcaggctcctccgcttgtcgagggtctcctccctggttttaatatataggtgtgtgttgaatatatgtgtgaaatatttgtaatattagatatttaagattacacaacaacggaaaaaattagtcaaggcttcaggtgaagagcgggggtggtgggagttggggagagggagtgtggtgaaggcagggtctgccgtgttcctccttcggggctcaaaccctctcactcctcctctgcgcccccagcccttcctaaggaagctggggaccaacaggtgctccgagcttcccctgtctctgggagagcctctcctgctaaagcgacttgcatctccggactcactctccctccccgaaattctctttgctttcttttcagccaggcagccggctctcttgtttgtctgctttttaattacttattttcttcccctctagaagatcgtgtgcgctctgaccctctgttgctcaagcatcaaattgaaggacgagccatattaagtgtaaaggtttataataatttaagtattcatagaatgcagaacaataagatgtaggaaatacaatttgcataataaatatcaatatcacaacagctaaaacaaaccatgacaaattatctgtggctaaatgaccaagagattactgaatgtaaattgctaagtctgagctatagtctagaagagctgcgccaaatgacttccccagccttctgtcctcatcttgctataaaataaataaataatacatatcaaaaaggaagtcatgatctgccaacccaccaaatgagttacacttaaaaacagcctcctattatccattatgcataaactaatttcgagactgcccggtcttcacagccctggatattctgctctgtaattacaggccccgatgcatgaactgcaggcagtccttcagaagtggggaaagctccaacaggagaacagcactacaggagacaggaaaccattgccacgtgggtgccaggataatgcccagtctgcaaagtcctacccgttcttactacctctggcagtgaggtacctgggtcggaccaaatagagagcaaagttccaccaaaattggaataaaaaagttaaggccagccgggcacgctgactgatgcctgtaatcccagcactttgggaggttgaggcagatggatcacctgaggtcaggagttcgagatcaacctggccaacacggcgaaactccgtctctaataaaaatacaaaaattagccaggcgtgatgacacacacctgtaat

SEQ ID NO: 75 - DNA, 2197 bp, Homo Sapiens
ttatattcagttttctgaagttttggttgcataaccaacctgtggaaggcatgaacacccatgtgcgccctaaccaaaggtttttctgaatcatccttcacatgagaattcctaatgggaccaagtacagtactgtggtccaacataaacacacaagtcaggctgagagaatctcagaaggttgtggaagggtctatctactttgggagcattttgcagaggaagaaactgaggtcctggcaggttgcattctcctgatggcaaaatgcagctcttcctatatgtataccctgaatctccgcccccttcccctcagatgccccctgtcagttcccccagctgctaaatatagctgtctgtggctggctgcgtatgcaaccgcacaccccattctatctgccctatctcggttacagtgtagtcctccccagggtcatcctatgtacacactacgtatttctagccaacgaggagggggaatcaaacagaaagagagacaaacagagatatatcggagtctggcacggggcacataaggcagcacattagagaaagccggcccctggatccgtctttcgcgtttattttaagcccagtcttccctgggccacctttagcagatcctcgtgcgcccccgccccctggccgtgaaactcagcctctatccagcagcgacgacaagtaaagtaaagttcagggaagctgctctttgggatcgctccaaatcgagttgtgcctggagtgatgtttaagccaatgtcagggcaaggcaacagtccctggccgtcctccagcacctttgtaatgcatatgagctcgggagaccagtacttaaagttggaggcccgggagcccaggagctggcggagggcgttcgtcctgggactgcacttgctcccgtcgggtcgcccggcttcaccggacccgcaggctcccggggcagggccggggccagagctcgcgtgtcggcgggacatgcgctgcgtcgcctctaacctcgggctgtgctctttttccaggtggcccgccggtttctgagccttctgccctgcggggacacggtctgcaccctgcccgcggccacggaccatgaccatgaccctccacaccaaagcatctgggatggccctactgcatcagatccaagggaacgagctggagcccctgaaccgtccgcagctcaagatccccctggagcggcccctgggcgaggtgtacctggacagcagcaagcccgccgtgtacaactaccccgagggcgccgcctacgagttcaacgccgcggccgccgccaacgcgcaggtctacggtcagaccggcctcccctacggccccgggtctgaggctgcggcgttcggctccaacggcctggggggtttccccccactcaacagcgtgtctccgagcccgctgatgctactgcacccgccgccgcagctgtcgcctttcctgcagccccacggccagcaggtgccctactacctggagaacgagcccagcggctacacggtgcgcgaggccggcccgccggcattctacaggtacccgcgcccgcgccgcccgtcggggtggccgccgcgcccggcaggagggagggagggagggagggagaagggagagcctagggagctgcgggagccgcgggacgcgcgacccgagggtgcgcgcagggagcccggggcgcgcggcccagcccgggggttctgcgtgcagcccgcgctgcgttcagagtcaagttctctcgccgggcagctgaaaaaaacgtactctccacccacttaccgtccgtgcgagaggcagacccgaaagcccgggcttcctaacaaaacacacgttggaaaaccagacaaagcagcagttatttgtgggggaaaacacctccaggcaaataaacacggggcgctttgagtcacttgggaaggtctcgctcttggcatttaaagttgggggtgtttggagttagcagagctcagcagagttttatttatccttttaatgtttttgtttaatgtgctccccaaatttcctttcatctagactatttgattggaaatatgtcagctatgatgatgactttctgggaagcgattcctgtcacccgctttcccctcctccccaccccacgtcctggggctttagagagcgattgggagttgaatgggtctgatttcggagttagctggctgagtccgcgctg

SEQ ID NO: 76 - DNA, 2302 bp, Homo Sapiens
aaaccctagacttctttctttactaaatatttctagtccaggttgcagcaggtggacacaggccggcagccatgaacgcaggtccacatgggagttgtagttccgagtcaagcggctgctctacagaacggctagaagcgagacttcgtctcccaggagacatctcgccgtgcaaaatggcacgccacgaggtggagtacctgcccgacgagaaacaagaggcgggactgcaactcccagaagcctccgcggccaaggcctcaggccgcaggctgaagccaaggagggagagttcaggtagatccggcttaacatcaggtgcgagtagggaccacccttggtagtctgggcccggcccaggtcagaaccttactaaaacaaccactgtgagtattttctattggtcccagcacatttctgagagaccagaataataatagcagtaaatctgcaagtggtaaactttcacaagcataacctcaatttagatttcggcttcaggcaacatcctttggccacttgacctgggagcattgagctccttgtttcccagataagcgctgtgagtggctgttccaaggtaacacagcgagggcagaatgtgagcctacagagaaatctgcagatgcatctcaagttccactaacctgcctccttaccccccaccaccaccaacttggatatacctttaaaattcccccctttgacgctaaaaataaaaacaacaaccataaaataagtgtaagaaagtccgaccaagtaccgatgagttctcccacaacaataaattcgatgcctctttgcctgtttttgaagtagtaatgtaaaattatctcccaaaatgctgccttctctatactccggtttgctcctgtcctgggcacgtgttcagcaaccccttaggggaatccagagctgcgtgtttaacacagacctgttgggacggattttcgctacttgtctatgaaactgacgaaccatcccaaaacggcgggtgccgactacacccccagagccaagagctgtggcgtccccggacccgctggcgtggccccgtgcctcagtttccccaatgtataaacacggtggaggaggaacgggttagggctagggtcggtgcttgggaattggggggcccgagtccccaccctgagaccctcgtggggcggaagagtactcgggacagaagcccaccgccccgtgagcggcgccggccccactgggctccggggtgatgacctgacgcgcgtggaaacccagacccgcgccccagaaacagtattccacttgggcttgcctccccgcccctaccttccaggatgttgacagctgggaatgaaaggcagagggagggagcgcggggccggagcgccgcctgggagtgtgcccactgggtggccgcctgagggacccgggaacagagggcaaaaagtcctgtgaccggacagagcagagcggggactgcaattcccagaagaccccacggtaggggcgggacccaagatggccgcttgtctggggacaggagcggaggccaatacgcgcagagcatgcgcctacgccgggccaattgaaagccatagtgacagtaaccctgattcaggggcgggaaacactgaccacagaagacaagttgaggtgagaatccccttacaagggggtttggggcataaatcgcacaatctttggctttttctaactagaaaaagaaacatgattcttttcacgtgtaacgaaaggctgtaccgcacttttgcttttttctttcctcccaaaacgcgtttaactatcccttcacgacttcccactggctggatttcttttcgtttcatttccccactctggatctttctggattccttaagccttcttttctttatgtgtctctcagaaacacagacttgcagtccctggcttgatccatcaaataatgtggtcatttacgactacgctcagccctccctggcatcctaacaaaattgcaccacatgcgccccttctcttttcctttctgtcttttctgtgctgtttttctccttagcatttgtcgttacgaagcattgtataaaatttacgtatttatcttttttaccatcttactttctcactagaatgcaagatccctgcagatgtggatttttgttttggtcactgtagtctttctagcacctagaaaagtgcccagcacatagtaaatacaccgtattttcaataattgaacgaaatctagagtgacctttctcccctagtctccctttctctggtgcagatcaacccgtttctgaccaccatggttccttgt

SEQ ID NO: 77 - DNA, 2488 bp, Homo Sapiens
tctccatctaagcccaaagcagtagaagaagggctgaggtcaatcattagctaagcagtttctacttttcttcccactcgcagggcctgtagggtagtgggaagagctctgggttacagatctagaaaccttagattttcatattggctctgctgtggaattgttataatacatttctactctcctggtttcagtttccctgttgaactagatggtatgggaatctccaagttcctcacctgtgagattctttgaatcctgattcttctccatcccaacaccacagcagttctccacatcctcctaaaccagtgatcctccctcccaggtcttgaccttgccttgggaccctctactgcacatcagaagtccaatggctttctctgcctacccctcgcacagataggtgagccttgggttgcaggaaaggcccagctgatcatgggcctcttgccccaccctaccacgaggctcacagacagtgatgaaggcctggatacatagactgcaggacaaggtcagactggctggtgagaaagggcattctccagcaagaattctcttccctaaccaagcagagatggggattgctgcttactgcaggttcctgtcttacgtccttctcatatctgattcactgatccacagttttttccccactaatctttttcctcctaggtatttcctacttgtttacatcattgtacactccctggctgccccattccctttctgggttcagtctcctccaatttctaaactacccatgcccctgttctttttctcccctggctacactccctttcctgtgatcagtgttctttatccaaaccctcctcctacctccaaatcacatatccctcttcctggaaagagcctcccacacagctgcctccttccaccacctccctaccgtggtctctaaccagatttggaccaccaaagccccctctgaacaggccccacctgctctaggccaggctgccatctccgcgctcccctattccccagtcttaaccaggagggatgcggcaggagtgctgcgtggggctaggcacgccaccagccagtccccaagccaacatcctgagccccgcggcttgctcaccgagtgacttcatgtagtcatcgaaattcttgctgtccactagcttccaggtgcccaggaaagcgtccaccatagtgatgctgggctaggctgagagaagctacaagagagcaggcgtgcaagggctccgacggcggctccctgcccgggctgccgctttaaatagccctcgcatcacatgaggagacgtggcccacgcccccggctcccgaaataggaagccccaggctagggctcacccaggaggggctggtgcgcccatcccccaacccaccgaggtgggtggggaccagccagtggcgccctgctagcctgcgtcagcgccagtgcctggcccccgagtccctaccccaggctggtaggaccttctccctttcctggcctctaggcactctggaatctgagaaggaagcagccaacaccagcccgagagctagggcgcatgccatggtggatatcttcccgtcccccagtccctctttgagcttagcgtcagagcagagatgagactagaaaagcaaaacgcccttgggctggtgcccacgccggggaaagctctggttgacttctggcacgggcatctgtcctcgttttacaagtgaggagtccgaggctcacaggggaactgacaaggtctcaagaaataggagggggtgaatggagctcagattgcaagcttagtctagcgggcttcagagctcgcgctctcccttcactctcactgcctggtggcggagacagtcaccagcggctcggtctgcggctgagctgaccttgtcctctgcctgttttgagcaaaagcctgacccttcgcgccccgcccgcctcacacgtgcttgcccctccctgcggaatgtctcctgctggccctcctccgtccccaccccaccccaccatctagctccccacccgcccctgcaagtgctctgggcttttccggtttcttcgcacagctccgagctttagctcaggtcgttcccagctcccctcctgcagaaattctgccaattcggtcagctcttcaaggcccatggctgccttccccacctgccgccctttctttggcctgtgcacactagcaagccgcctgcacttttgggtaatttgctgcctcctttcgagagcctgttgtgcggtggtttgtcactgtatagtttactaagcactttcagtaaaaataagacctgccttgtcttgctatttattgcatgctgagggctttgggtgtattgtttcattgaactttttattttattattattttttagagacaaagtctctcgctgtgtctcccaggctggagtactgtgacgccatcatagctcactgcagcctcaaactccggggctcaggggatcctcctaccttagcctccccagc

SEQ ID NO: 78 - DNA, 2361 bp, Homo Sapiens
gaggggttttttgcttcctcccccttccaacgtctaaactgtcccagagaacgcccatttcccccactatttgtgagcgcagggtgctcgcaaagaagaggaggaaggaggaaggcaggggagggagaacggcaaggagagctccgcagggctgggagaaatgagaccaagagagactgggagagggcggcagagaagagaggggggaccgagagccgcgtccccgcggtcgcgtggatttagaaaaaggctggctttaccatgacttatgtgcagcttgcgcatccaggggtagatctggggttgggcgggcggcgccgggctcggctcgctctgcgcactcgcctgctcgctgctggcaggggcgtcctcctcggctccggacgccgtgccaaccccctctctgctgctgatgtgggtgctgccggcgtcggccgaggcgccgctggagttgcttagggagtttttcccgccgtggtggctgtcgctgccgggcgagggggccacggcggagcagggcagcggatcgggctgaggagagtgcgtggacgtggccggctggctgtacctgggctcggcgggcgccgcgctggcgctggcagcgtagctgcgggcgcgctctccggagccaaagtggccggagcccgagcggccgacgctgagatccatgccattgtagccgtagccgtacctgccggagtgcatgctcgccgagtccctgaattgctcgctcacggaactatgatctccataattatgcaactggtagtccgggccatttggatagcgaccgcaaaatgagtttacaaaataagagctcatttgttttttgatatgtgtgcttgatttgtggctcgcggtcgtttgtgcgtctatagcacccttgcacaatttatgatgaattatggaaatgactgggacatgtacttggttccctcctacgtaggcacccaaatatggggtacgacttcgaatcacgtgcttttgttgtccagtcgtaaatcctgcctgatgacctctagaggtaaactcgtgcactaataggggagttgggtggaggcgaggggggtggcgcgcgcgccccgggcgcgtgcccgccgccagttgccgccgttcagccggactcgagcgccacccgctggaggcagggctcatcgcccagcttccgaccgggggctgcaagggccggggtcgaattgaggttacagcccattatggcaaaattattgcatttccctcgcagttccattaggatgtaccaattgttaggccgtcagctgccgatcgcgcgcccggcgaggatgcagaggattggggggaggtggtgacttgcattttatttacaacaactttatttcccccgttttgcagcccctcttatttttgtgtcgaggttggggtcggtactgaccgtcctgccagcagctctgaattttgaaaatacagatatcaccttcggggaagggggaaagccatttagccaattggagaaataaatcctgcccgcagcagcagcagctacaattacggctctgtttttgcgagcgcatgagggacagtgtccctgccgctcttaaatgacaggcgtctattaaagatagcttttgtgtagtgtttctccaaggcgaggtcaaattccatacacttttataaccgtagtcgatttttctttcgtgtgaatatggttttcgtgtcattagtttgcgatttgatttgcttacgtatccagcctggaaaatcttcatcacagggtccggttcctcgagccagccgggccccaagtcggagggttctccttgaacccagcgagtgggcccaggctccctgcagccacagaggctgcctggggtctggggatccgtggggcgggttactggggtcttgcttagacctccaggagtaaaatgagggcgataatggaagcattccttggcagtgcctagtatctctgtagttattttccacggctccgaaagactcaagtaaatcacaaatatagctgagaggcaagtggagtctccccgctggaggcccggcgttgcaggcgcccctggcacgtctggaagccaggactctggcggctcccatggccctgggcccctcgttgggtcctgaacgctgctgtggcggcgacgcgggcgctatcggaggctgggagcgggaatccggagccgggagcctaccccgggctgtaatgttccacccgcgcccaggttaactcgcctcggctgaggctgcttctcttccactgacggttgcacacgcgggaccgagagactgggctctgttggggccccctttgttcctcgagcttccttcctgttctgggaggcggcttgggaggccgcgacaaggccgggc

SEQ ID NO: 79 - DNA, 2421 bp, Homo Sapiens
gtcattttaattgtatgggagtcccacaacagcatagggagacatttctgatcattattcccattaggagggtggagaaactgaggctttgggaggtggtcctgacctagggaatcaatttgctgactcactaacccatgaagctctacagttaaaaaagactagattaaaaaatgagaactcagtaaaggggctgaggcaggaggatcgcctgagttcagaaatttgagatcagcctcggcaacatagtgagatcccctctctagaaaaattttttaaaaaattaggccgctcgaggcagagtgcagtggctcacgcctgtaatccaacacttcaggaggctgaagagggtggatcacctgaggtcaggagttccagaccagcctggccaacatggtgaaaccccgtctgtactaaaaatacaaaattagccggtgtggtggcacacgcctgtagtcccagctactcaataggctgagacaggagagtctcttgaacccggcaggcggaggttgcagtgagccgagatcgtgccactgcactccagcctgggcaagacagagcgagactccgtctcaaaaaatacaaacaaaacaaacaaacaaaaaattaggctgctagctcagtggctcatggctcacacctgaaatcctagcactttgggaggccaaggcaggaggatcgcttcagcccaggagttcgagaccaggctgggcaatacagggagacacagcgcccccactgcccctgtccgccccgacttgtctctctacaaaaaggcaaaagaaaaaaaaattagcctggcgtggtggtgtgcacctgtactcccagctactagagaggctggggccagaggaccgcttgagcccaggagttcgaggctgcagtgagctgtgatcgcaccactgcactccagcttgggtgaaagagtgagaccccatctccaaaacgaacaaacaaaaaatcccaaaaaacaaaagaactcagccaagtgtaaaagccctttctgatcccaggtcttagtgagccaccggcggggctgggattcgaacccagtggaatcagaaccgtgcaggtcccataacccacctagaccctagcaactccaggctagagggtcaccgcgtctatgcgaggccgggtgggcgggccgtcagctccgccctggggaggggtccgcgctgctgattggctgtggccggcaggtgaaccctcagccaatcagcggtacggggggcggtgcctccggggctcacctggctgcagccacgcaccccctctcagtggcgtcggaactgcaaagcacctgtgagcttgcggaagtcagttcagactccagcccgctccagcccggcccgacccgaccgcacccggcgcctgccctcgctcggcgtccccggccagccatgggcccttggagccgcagcctctcggcgctgctgctgctgctgcaggtaccccggatcccctgacttgcgagggacgcattcgggccgcaagctccgcgccccagccctgcgccccttcctctcccgtcgtcaccgcttcccttcttccaagaaagttcgggtcctgaggagcggagcggcctggaagcctcgcgcgctccggaccccccagtgatgggagtggggggtgggtggtgaggggcgagcgcggctttcctgccccctccagcgcagaccgaggcgggggcgtctggccgcggagtccgcggggtgggctcgcgcgggcggtgggggcgtgaagcggggtgtagggggtggggtgtggagaaggggtgccctggtgcaagtcgagggggagccaggagtcgtggggacgatcttcgagggaaggagaggggcatccgtagaaataaaggcacctgccatgccaagaaaggtcgtaaataggagtgagggtcccggggataagaaagtgaggtcggaggaggtgggagcgcccctcgctctgaggagtggtgcattcccggtctaaggaaagtggggtactggagaataaagacatctccaataaaatgagaaaggagactgaaagggaacggtgggctaggtcttgagggggtgactcggcggccccctcccgggagttcctgggggctcggcggccgtaggtttcggggtgggggagggtgacgtcgctgcccgcccgtcccggggctgcgggctggggtcctcccccaatcccgacgccgggagcgagggaggggcggcgctgttggtttcggtgagcaggagggaaccctccgagtcacccggttccatctacctttcccccaccccaggtctcctcttggctctgccaggagccggagccctgccaccctggctttgacgccgagagctacacgttcacggtgccccggcgccacctggagagaggccgcgtcctgggcagaggtgagggcgcgctgccggt

SEQ ID NO: 80 - DNA, 2251 bp, Homo Sapiens
ccataactaagtaatccagaaaaagaaatgcaggcggagaatagcagcctccctctgccaagtaagaggaaccggcctaaaggacattttctctctctctcctcccctctcatcgggtgaatagtgagctgctccggcaaaaagaaaccggaaatgctgctgcaagaggcagaaatgtaaatgtggagccaaacaataacagggctgccgggcctctcagattgcgacggtcctcctcggcctggcgggcaaacccctggtttagcacttctcacttccacgactgacagccttcaattggattttctccatctagcggagccgggggctgcctggaaagatcgctccaggaaggacaaaggtccggaagttgtgggaccttagcagcttgggctccccggatcacccccaaatgatcatttcggaatggagccccagttttcactaggatgccatgggctctaaaatatacagctatgagttctcaatgtttcgagatccaaaagtctcagacctcaatgctttgtgcatcttttatttcagggattccctacgcccagcaccgggtggatgtgcaaagaagtacgctttaggccggctcaaggttccccaaagctccactcctctgcctaggcgttcaactttgagttcggatggtcctaacatccccatcatctacacccaggtctcccaacaatgcaactcctatgatgatccctctagccaagcttccatcccactcacccccaaactcgctaagtccccactgccccacccccagccccagcgattttcccgagctgaaaatacacggagccgagagcccgtgactcagagaggactcatcaagttcagtcaggagcttacccaatccagggaagcgtgtcaccgtcgtggaaagcacgctcccagcccgaacgcaaagtgtccccggagcccagcagctacctgctccctggacggtggctctagacttttgagaagctcaaaacttttagcgccagtcttgagcacatgggaggggaaaaccccaatcccatcaacccctgcgaggctcctggcacaaagctggacagtcgccatgacaagtaagggcaagtaatccgcctgccggaggaagcaaaggaaatggagttggggaggagggtgcagagtcaggattctcgccgacctggtgccgtagatactaacattttggggtggaaaattctgcaagccagagctgtgagggcagaattggtggaaatcattttggaggaatcctgcattgtgtcaaatatgaagggtggaaggaagaaagcttttgcgtttgctctcagctggatcctttcttctcatcagttaaaatgtcattttttaggaaggctttccgtaatatcacaccctaacgttttctcccagatactttatatcacaccatcttatttaatctccttcacaacccttatcactctgataagatttatttgttcattgctttcagtacatggaaacgtaagccttatgaggatatagaatttttctactatcttattcattgttgtattcctgagtgcctatatcagtgctgggtagcaagtaagagctcgataataaatattttttgaatgagggagacaggtctgaagcctggagaatgagatgcagaagaggtgcaagacctgctgcgccctctgcaggcggcgggggggcggtgcaggtgctttaagaattaccgcgggactcggtagggggagcgtaggcgcttctcgccaagatagaagcgttcagactacaactcccagcagccacgaggagccctagggcttgatgggaacgggaaaccttctaacctttcacgtcccggctccgcgggttccgtgggtcgcccgcgaaatctgatccgggatgcggcggcccaatcggaaggtggaccgaaatcccgcgacagcaagaggcccgtagcgacccgcggtgctaaggaacacagtgctttcaaaagaattggcgtccgctgttcgcctctcctcccgggagtcttctgcctactcccagaagaggagggaagcacaggtgggtttctttagctctgcgtcggatccctgagaacttcgaagccatcctggctgaggctaatctccgctgtgcttcctctgcagtatgaagactttggagactcaaccgttagctccggactgctgtccttcagaccaggacccagctccagcccatccttctccccacgcttccccgatgaataaaaatgcggact

SEQ ID NO: 81 - DNA, 2497 bp, Homo Sapiens
tccaggaagctagagtcatgctggcttgggacagtggcttggagaccagacttcaatgacagaagcactaggcagcggcactcatggcaatgtgtgcacccacagaaatgtaacccacacctcgggttcaggagccgaaaaatgaaaagaacgtttagggaggaaaaagggaaatacaataataggcagagagtaatttattactctatgggtctgctctgtaaatagctgaagactctggagccagatggttctgcaaattctccaaacaggagtcacgttaagaagcacgagtgggcacaaaaactgtttttcaagacacaatttcaatttggcttgtggaaactggatacgagtaagtttccttaaaattcgagtagaaagcagctgtcctccccgggccccttgatgagaatacgcacaccgcccccaagcggccggccgagggagcgccgcggcagcgggagaggcgtctctgtgggccccctggcagccgcggcaggaaagggcccgaaggcagcgaaggcgaacgcggcgcaccaacctgccggccccgccgacgccgcgctcacctccctccggggcgggcgtggggccagctcaggacaggcgctcgggggacgcgtgtcctcaccccacggggacggtggaggagagtcagcgagggcccgaggggcaggtactttaacgaatggctctcttggtgtcccctgcgccccgtcggcccatttttctttttacaaaacgggcccagtctctagtatccacctctcgccatcaaccaggcattccgggagatcagctcgcccgaaagcccctgcgccaccccgcgggccctcctaggtggtctccccagccccgtcccttttcgggatgcttgctgatcaccccgagcccgcgtggcgcaagagtacgagcgccgagcccgtgcgcgccaaggctgcgtgggcgggcaccgacttttctgagaagttctagtgctcccaagccccgacccccgcccccttcactttctagctggaaagttgcgcgccaggcagcggggggcggagagaggagcccagactggcccccacctcccgcttcctgcccggccgccgcccattggccggaggaatccccaggaatgcgagcgcccctttaaaagcgcgcggctcctccgccttgccagccgctgcgcccgagctggcctgcgagttcagggctcctgtcgctctccaggagcaacctctactccggacgcacaggcattccccgcgcccctccagccctcgccgccctcgccaccgctcccggccgccgcgctccggtacacacaggtaagtcgcccccggcggccgccgaggaccaaagctgcccgggacatccacctggagcgctgaggcttcagtccctctggtggaccccggaacctacactctccccgctcgcctaccccagcccgctcctctcagccgctggaggactcttcagggcaaggctccagagccatcctctccagccttgaggttcacaaaccaactcatcaggacaccccaagatttccttactctctgaagtcctccttaagcctttgtatcagcactccagggaagagtctgtacttcccctgccctccctgcaaccccaaactacagttcctgatcttgctcaccttcgacttcccaaaagcccccaaattgttggtcttgcgccccccacactttaaaaccagcatctctttcctccacctctctctctctctctctctctctctctcatgctctctggaaagtaatcctgttgtccttcatttcagcaaacgcggggtcaaagagggatggtcccggccctgtccccatgcccagccccgtttctgcgcaccgtccctccctgcctagctgatctctgaccctcggctcttgtgcttcctgctacaggatccctgctgggcaccaacagctccaccatggggctggcctggggactaggcgtcctgttcctgatgcatgtgtgtggcaccaaccgcattccaggtgagtttgtgtggcacctttaggggaaggagggacaaggaagaggtgctggctatcccaggtgtgccccctcacgtgctgtcctctccctcttgagcctgactggacatcaggacgcagcttcactctgatcctggtatttattcacctctttcagtggttgccaggagttttcaccccaaccctttgtctccacccctaaggactcagccccctactgctggtcccagcctagaaagctcactttgtgttctctcctgtctaacagagtctggcggagacaacagcgtgtttgacatctttgaactcaccggggccgcccgcaaggggtctgggcgccgactggtgaagggccccgacccttccagcccagctttccgcatcgaggatgccaacctgatcccccctgtgcctgatgacaagttccaagacctggtggatgctgtgcgggcagaaaagggtttcctccttctggcatccct

SEQ ID NO: 82 - DNA, 2451 bp, Homo Sapiens
tgacgtgtagcgggagcttcagaaagcgtggccgaatctgcagctcttaacaaatggctcgttcccaaaccttagcctcaactccttctgagcgataggggcatgctaccagcacggggggaaatgagatacaagaaacgcccgaaagggaaaaacaaggctgggctgtttccttcctttggggtcaagacagaggcacagaaggcccaggtctgggaggttggatcacctccggctggatgttgagccgggtgggagcccaaacagcagggggcccacaggaggccggcccaggcagcctcgcgtccacttaccaggccaggcccaggcacgtccccagcgacagcaggctcaggcacgttcgggggtctgcccagcccccgcctccgctgctccgggccacgggggtcttcccgccctcgctccgcttcccgggctccgcagcaggggctcccttgggccccgacttcttccggctcttcacctcagacatgtctggagaccctaggacgacaagcccagggcagcttcttcaccagggggagcaggacgtggccgccttggcgttcgtgggaaccctgggcggtgaccgcgccccctcacagacttggcaccgcccagagcccagccccttccctctccccggcatcctcgttgcttcactgagtctttcagctgccagctccatagttcccctaggagaggtgggcggcgacctcaacccacagcgccttccactgcgatattgctccaaatccgaggaaattcaaactcccgggcgcgcgcaggccgacgggacccgaggaggaggggcaggacgaaggggtcgcgcgcgccacgtcgggcgcgccgccgctgcccgagtccggcattggtgggaacgcggcgcgtccctgaggcttagccacgccccgtccgcggggtaggcgggcacttctacgcgcgcgggcatgagccgtggcaggagtgcgcggcggcagcggtggccgccccttggggcttggggtgtgtttatttgcataagcgggcgcgcgccgtccgggctgggtggatccggcgggatttgactgctccgctgtccagaggcggagaagaagaggtagcgagtggacgtgactgctctatcccgggcaaaagggatagaaccagaggtggggagtctgggcagtcggcgacccgcgaagacttgaggtgccgcagcggcatccggagtagcgccgggctccctccggggtgcagccgccgtcgggggaagggcgccacaggccgggaagacctcctccctttgtgtccagtagtggggtccaccggagggcggcccgtgggccgggcctcaccgcggcgctccgggactgtggggtcaggctgcgttgggtggacgcccacctcgccaaccttcggaggtccctgggggtcttcgtgcgccccggggctgcagagatccaggggaggcgcctgtgaggcccggacctgccccggggcgaagggtatgtggcgagacagagccctgcacccctaattcccggtggaaaactcctgttgccgtttccctccaccggcctggagtctcccagtcttgtcccggcagtgccgccctccccactaagacctaggcgcaaaggcttgggtaagttgacctcctcgcttttctccccgagccaggttctttggaggcttggtagctgatttcagggactgagaatttgaggacatggaatatttgataaccatcctgctcctgtaccaggaagagaaattctgtaatgaggaagtagtaaacttggggttttcgtggataaacgtgcgctgttttctgttttacgtccatgaagagttttggctttccattttgttgtgggttacaaaaggttttgagacttagttcagataagttgtgcagttttaaaacgtatttaagatttgcatattttagtttaacaggactaggtgaaattggaaattagtttcagaaaaccagagtgtcttatttgcttagctattggacatcacctaaaaaattcattcattcttgttttttcacatcgaatttcattactataaattaaggaacattttatgtttaagaggacaaaaacgttattaacattttaaaaaatgagagttttgattcgaatcaataactttttatcagttttgtgcccctgctgggcattttgtaagccttgacaagcataggcaaatgccctacgtccgtccctgtttttccaagtgctacatttggtgacttcaaaaacagtcattgaagcttgataattattgcccccttctgtgagctccaagttacttgtgctctgtttttgcacttcgggcattcacattcccactctctctctctttttcttctttgagtagactgtgaattatttcaggcaaatgactcaatcttttctgtagtcttggtgtctgacatatagggaggggcacaaatgt

SEQ ID NO: 83 - DNA, 2347 bp, Homo Sapiens
cgagactgaggcactggcgggtgcggccgtcaccgccgcttccccgggtctggatggggtcgctcgcggcggcagcgggggcggtggccccaacgggaaatccgggaaggctgcggggttggcaccggccacaaggtaggaacgcggggagcgcgcggaggcctccgcgccttcctcctcctcctttatctttagagcgggcggctggaagtcgctatagagagggtacgcgtcgtccttgggctcggcgtcgggcgggtacgcgcagtcggggaagtcgcctacagcgaccggggtggacgaggcacagggtgaactccgcggcggggcaaaggcgctggcagccccggccccgccgtcgtaactttcgtcttccagcagctgccgagtgcgggctgccaataaggcgtgattgagaggcaggataggcacgtggatgaaatccatcaccgtggtggccagcggggagcgcccgggcgccatcggcgcgtcctgctccaccagggcgaccctgggcgctgagaagcgggaatcttccttggggaccagggcgacgcctcctgctgccgcccccggcgggacagccgcggctcctcctccagccgccgcgccacccagagcccgaggtttgcccttcagaagcggacccgcagactcctcggactcagagccatcctcctcctcaacctccaccgcagcggcctgcggagacggcttcactggggccccggaccagtgagggctctcagaggccgggagcagcagctgccgggctggtgacaggccccggggcagcactttatgggcagctgccgtcccggagctgtctccaaccttgcacccggaccggctcatgagcggggacaacacccgctgggtggcgggggcagccggtggatcttcgggaagttcggggccaaacaggcaccaagagctggtgacctcgcaggcgggagggctgggttggctctgcccgggacctgagggcgccaacagagtgtccaagacactgtccagcagtccgctgtccttttctgggggactagaactgctgcctccagcaccccttgtagcttcagctctggaatatgcgccctccacgtccgacagcgactgctggtcctgcgtcttttcgtcggaggggtcctgtccctggcagggccgagggaagagtagcccgtccagggagataggtatggccgaaacttcaggcaaggtgtccgaggtctggctccccgggaacggacctgcggctgggcgacacagcagtggggatccgacctcgggggagggcgggccgcccgccacgtggggagcccggggaccctttgccttcagctcagtcatgacgactggactccccttttctcctcccccgtctccaggaggagggaaaagggaaggaggagggggtttcgggaatataggggcagagggaggagaaagtgggtgttgaatgtggctggaccggagggatctccacctcctgggtcgggggcgggggagggcggcgctggtcagctcctgcccttggcctccatcctgtcgtcaggggaactgtggctgtcgtttgtcccagcgagcggcaagtggggagcgcaagaaaaagtagtaattgttaggagatctcgtctcctaactcggggagttctccaagagagttctccaacttctgtccgaggactggagacgcagagtactcacaagtccggcacttgagtggctgcggctgcgacggcaatttagtgacacgcggctcctttatctcccgactttttctctggcatcaaactcgtgcatgctgtgaagctctcagtccctcgctgagttccactgccccctcactaaaaccctggggctagtcggacctctcggtacagcccattcccaggaagggtcggacttctgctggctccgtactgcgggcgacagtcatctccgaagatctcagatcccagtagtgcgggagcactagccgcctcgggttgtagatttcactcaaatgacaagtgaagctagttctcattgagaatgccacccacacgcacaaatacaacaaggcttaccccgattagtgacagctgtggactggccagacagctttctaacaacgcctcctcctctagggaggccccgcccaaagcccctccctaccccaattaccggtaggatctgaaactctggagttggcatttccacccgttattctgaatgctactctcaatagcaggttctttgggatggaacctcataagcatattacgttttgttttgcaaattaagaattatgccctatctaattggaaaaatgaatagattctatcagaagtagaatttttgtcaccat

SEQ ID NO: 84 - DNA, 2364 bp, Homo Sapiens
atattgtgtataaaaagatcagattcaggatgatttggtgggattgccaggggctgaccggagtgttgctgggaaggagcctcagctccgctccaggtcctccaccaggtaggactgggactcccttagggcctggaggagcaagtccttgcaggtccagttccaggctggtgtgaaactgaagagcttccgcatcttgcttgggttggtgggctcggcccgcactgcctggtactgctcatccgtcaggaccttcccgtacagagcatccagcagccactcaacgtttgtgaccctcgcgataagcgcagcccggtgctggtctataaagtgcaggcctgggggtgggaggagaacatgagccagcagccagggtgtggggcctgtccctgctgaacttgagttcttcaggaattcctctgcaagcctaggggcagggctccagggggcggccaccaggaccccacatgcagtgggatgagggtaatattgtctcccttcccccgcagggtgtgggttggtgggtggggtgcgcagggttgccaagccgtgcctgccctgccctgccctgccctggttgcgggagcacagatgcaggctgtgcaggagtgcggtggggccgggctgggtgtggaggcctcacctggcttggctgccgactgaggaggggcctggatcccagctggcgcggctccagagcctggaaggatatgggccaagtgatccccttcccttcccttcccgccgtggggccggggtcccgttggtcggtaggccaagcgtggggagcctcctttccggtagagcagctttgtttaggggtaggaggaacagaaagcggaagagcccgcggggtaagcgctggtgtgggtggaggggaaagacggggtggaggggaacgggggcggctcaccctggtgcgtggccgcctgcagctgcccggccatctcctgcaggcccatgtcgcgcagcacgttagcggtgagctcggcgccgtaggtctccaggtagaagctgaccagcttgtcggtgaggtccaaggcgtccatggacagcagcgcgccccgcgggatgcgcccgtagccctcgcgcagcggcaccgacagcagcttcagcttgaacttcttgagctcctcggcggtcaggttctccagcgcatccaggatggcgtcgcgcgcgcgccccatggctccaggatccccggccgctgccgccgctcaccccgctgcagccgccgaccaggaggaagtcggctccggggcggaacctggactccccgccttcctcccactctggtctcccgactccccgccccggtccgttgccctccagcaaaaggcgcttccttactacacccttggtcccctcccacccaggcctctggattggggccccaggccgtcgggggacgccaggatcgcgccctccagctggcctgcgaggtgggacccgggagggggccgcagaggggctcatgggtggcgcctgcttgtctctgggcttgcaccagcgggtacagaccggaaacctgggctggctctcactgggtttattggagcacctaggcttagaacctcggatttctagaaccccgaaacctccgcggttccccgaaccttaggatcctctcccacatgtcgtagaatcttggaatcatgacagctagaagcgtgaagctccctcaattccacatactggggaaaaatgagttgtacaaaagggcagagagtgcaaatctctctgagcttcagtttcattttctacgacatggggataaccctccggtgcttataaatattccagcataacatggccaacccgatggctcccgaaaccttgccagatgcttcctaggggagccagaatttgatcccaacactgattaaaaaaaagaaaaaagaaagagagacagcctccaggagattaaagaccatgaacttgaagccatacagttctttgtttgaatcctgactctacttcccaagggggatatttggaatcctttatttttccctctcatctgggttgtaacaatcactgttccttgtagtcatacgaccctgacatattatacgtttatatgcttattggacattcatccctctctaaaatgtgaggcctatgagcatcggagaccttaactgtcttattctttgctgaattcctagcgtcaagaatgtacctggaaatagctgtgtgtggtggagggcgcctgtaatcctagctactagggcggctgaggcatgagaatcgcttgaacctcggaggcagaggctacagtgagccaagattgcaccactgcactccagcctgggtgacagagctagattccatctgaaaaaaaaaaatgtatctggaacacat

SEQ ID NO: 85 - DNA, 2589 bp, Homo Sapiens
ctcccactccagagggcagccggtccttcgccggtgcccaggccgcagggctgatgcccccgctcagctgagggaaggggaagtggaggggagaagtgccgggctggggccaggcggccagggcgccgcacggctctcacccggccggtgtgtgtccccgcaggagagtgtgctgggcagacgatgctggacacgatggaggcgcccggccactccaggcagctgctgctgcagctcaacaaccagcgcaccaagggcttcttgtgcgacgtgatcatcgtggtgcagaacgccctcttccgcgcgcacaagaacgtgctggcggccagcagcgcctacctcaagtccctggtggtgcatgacaacctgctcaacctggaccatgacatggtgagcccggccgtgttccgcctggtgctggacttcatctacaccggccgcctggctgacggcgcagaggcggctgcggccgcggccgtggccccgggggctgagccgagcctgggcgccgtgctggccgccgccagctacctgcagatccccgacctcgtggcgctgtgcaagaaacgcctcaagcgccacggcaagtactgccacctgcggggcggcggcggcggcggcggcggctacgcgccctatggtcggccgggccggggcctgcgggccgccacgccggtcatccaggcctgctacccgtccccagtcgggcctccgccgccgcctgccgcggagccgccctcgggcccagaggccgcggtcaacacgcactgcgccgagctgtacgcgtcgggacccggcccggccgccgcactctgtgcctcggagcgccgctgctcccctctttgtggcctggacctgtccaagaagagcccgccgggctccgcggcgccagagcggccgctggctgagcgcgagctgcccccgcgcccggacagccctcccagcgccggccccgccgcctacaaggagccgcctctcgccctgccgtcgctgccgccgctgcccttccagaagctggaggaggccgcaccgccttccgacccatttcgcggcggcagcggcagcccgggacccgagccccccggccgccccgacgggcctagtctcctctatcgctggatgaagcacgagccgggcctgggtagctatggcgacgagctgggccgggagcgcggctcccccagcgagcgctgcgaagagcgtggtggggacgcggccgtctcgcccggggggcccccgctcggcctggcgccgccgccgcgctaccctggcagcctggacgggcccggcgcgggcggcgacggcgacgactacaagagcagcagcgaggagaccggtagcagcgaggaccccagcccgcctggcggccacctcgagggctacccatgcccgcacctggcctatggcgagcccgagagcttcggtgacaacctgtacgtgtgcattccgtgcggcaagggcttccccagctctgagcagctgaacgcgcacgtggaggctcacgtggaggaggaggaagcgctgtacggcagggccgaggcggccgaagtggccgctggggccgccggcctagggcccccttttggaggcggcggggacaaggtcgccggggctccgggtggcctgggagagctgctgcggccctaccgctgcgcgtcgtgcgacaagagctacaaggacccggccacgctgcggcagcacgagaagacgcactggctgacccggccctacccatgcaccatctgcgggaagaagttcacgcagcgtgggaccatgacgcgccacatgcgcagccacctgggcctcaagcccttcgcgtgcgacgcgtgcggcatgcggttcacgcgccagtaccgcctcacggagcacatgcgcatccactcgggcgagaagccctacgagtgccaggtgtgcggcggcaagttcgcacagcaacgcaacctcatcagccacatgaagatgcacgccgtggggggcgcggccggcgcggccggggcgctggcgggcttgggggggctccccggcgtccccggccccgacggcaagggcaagctcgacttccccgagggcgtctttgctgtggctcgcctcacggccgagcagctgagcctgaagcagcaggacaaggcggccgcggccgagctgctggcgcagaccacgcacttcctgcacgaccccaaggtggcgctggagagcctctacccgctggccaagttcacggccgagctgggcctcagccccgacaaggcggccgaggtgctgagccagggcgctcacctggcggccgggcccgacggccggaccatcgaccgtttctctcccacctagagcgcccctcgccagcccgctctgtcgctgctgcgcggccctggcccgcaccccagggagcggcgggggcggcgcgcagggcccactgtgcccgggacaaccgcagcgtcgccacagtggcggctccacctctcggcggcctcacctggcctcactgcttcgtgccttagctcgggggtcgggggagaaccccgggacgggggtgggatggggtaagggaaatttatatttttgatatcagctttgaccaaaggagacccc

SEQ ID NO: 86 - DNA, 2322 bp, Homo Sapiens
caggtctggtgcgcgcagagaacaactccaagcgcaccgacgcccgcgagctccttccaaacaccgaacgggatccagagcccgagcccacaggcggcggccgggggagggagcagggtgctggccgccgcccgggagtgttcgcgtcctgggtgacccctggaaggacgtggggcccaaactccggctggggttgggagagcagcccccagaggctctccgcgggatcctctgccgggcgggaccgtggctccacaggagaagtgggtggcaagccctgcttggcggaaagcagccgttcccctcctcctgggcctggggcggcgcccctcacccctgttccccgcccctcacccctgttccccgccggccacatcccctgccccttggattccaagcgccccgcgcgccgaggagcccagcgctagtggcggcggccaggagagacccgggtgtcaggaaagatgggccgtctgggggacagcagggagtccgggggaaacgcaggcgtcgggcacagagtcggcaccggcgtccccagctctgccgaagatcgcggtcgggtctggcccgcgggaggggccctggcgccggacctgcttcggccctgcgtgggcggcctcgccgggctctgcaggagcgacgcgcgccaaaaggcggcgggaaggaggcggggcagagcgcgcccgggaccccgacttggacgcggccagctggagaggcggagcgccgggaggagaccttggccccgccgcgactcggtggcccgcgctgccttcccgcgcgccgggctaaaaaggcgctaacgcccgcggccgcctactccccgcggcgcctcccctccccgcgcccatataacccgcctaggggccgggcagcccgccctgcctccccgcccgcgcacccgcccggaggctcgcgcgcccgcgaaggggacgcagcgaaaccggggcccgcgccaggccagccgggacggacgccgatgcccggggctgcgacggctgcaggtaggaggcccagggccggggggcggttcggctccgcgggcgggggctggagcgcagcgctgggcaggcacctgggctcgcagctccgaagctgggaggtgaggggagagcgatcggggacgagctgggacaaggcgacacaggggctccctcggagttggatcggcccctgggacttggcgctcgcgagaggctggagcggccagagtctagcctgcgaggagacgcgggtcctgccctcagcgccggccgcctttggcgccaaagacagccccgcaggggttccgggagggccctcctcctgctgtcccctctccaccccgggctccgagggccgttgggagggtaaccccgggaagaggccggggtgcggggcgcgggtgcaggtggaaatcgccagcaagctcctccccgcccgcgcgctccctccgacctgcagggctgtgccaatcccgaggcctcagcttccctgaggagccagggccaggcccccctctggacagggagaaggatctgggcgggggccttgacccatggagttggttactaagcggtttcgatggtttcccgagggacagctccctgtggctctgagtttgtctgtcgagggctcctggcctgtctccggagcggtcccaggtagagaaagcccgtgaagaaatggcccgggccggcctggagggagacacctcacgcccccttagctcctgggccgcctcctcctgcagcccctgcctttcccggggcttggacttggggagcgatgattacctttgctcagcttgtattttggcctggacgctaggagataagcccatgtagtatgcacacgtctgctacataaacaggggacagatagacgatcttcaaccagcaagggtgcagggaaaagcaatgcaccccaaacttctgaccagaggtcatttgcttccaaagatgctgccatctgtttattcactgtctggacatttggaaatggctcaggctcattaacacaatgctttggtttttgttgttttgttttttgttgctgtcattgctgtttatttgttcagccttagctctgggggaggagtaaacaaagcgcgtggcctctggcacttactgagcgctgagccacccctctttggatttattcggggaaagattaaaaagcatttcattaagaacaggacacggtgtttgaaatgttgccatatatgaatgtatgcattacgtatgtagtttttaaaataagataaaaagttggctgggcacggtagctcacgcctgtcatccctcacagcctttgggaggccaaggtgggtggatcacc

SEQ ID NO: 87 - DNA, 2345 bp, Homo Sapiens
cgtcggtcccgcggccttaccggacagggcgagcaccgagtcgtacattttgcagctcatcatccccgtgctctgcgtgacgcagtccatccacagccccttgtacatggcctgggccgtgatgatgttgtcacccgcataggagctcatctgccactgcgggatggcggtgcaggccaccagacccacccagcccagcagggccatggagaagcccagcaactgcaggcccgaattggccatttccgccctcagaaaacactgggggcgccgggcggggagaccctacagtaaaacaaacgacacttggggggcagccccacaaaagaaaacttgaggtggagttttccggtcacccaaagagacaaaaagggtttgggccaggtgaatgcaaatcttgtcaccaaactacacacaaatcgacccctccagtgaagcgatggcctcgcggcacagggagtaggatacgccgggagggtggttccagacaaaattggtggtccccgaaggccaggcggttccctccgggcgctctcggcgaccctaggcaaacaaaaggtggaggggccgtctgggcgcgtttctgagcgccggcaagtcccaaagtatcctgggctgtaggtccgaggctgcggtgcgcagcagaggtggctcggaggtgagccagcaggtgcgggcggacaggtggggcgcacctgagtatatgtagggcgtcgggggcgcggcccgcgcgccccgggagcgcgggagggggaggcgggaccggaggggcggccgaggatgacctgacgtcaccgaagggacactcacctgaaccggaagtcgtggcccccacccctccttgcccaggtgaggaggaagaaacctgagcaccagggtcacgccccttcgcttgcccggttttgaccgccgctggggaggaggcggtggctccccaggagtcccaagctccgagtcagcccctccggactggatttccctcgaacaccgggaagccccttcctttcttcccaacaggtgcgcctgggacgctgcggggcgcccctgacaagcctcggcgccgccctttccccgccgggttctgtccaaagtgctctctcctcggccctgctttcgcccccacccgctgctctccttttttttcctgtctcctaccctggtcgatcccaccttcgggggccctggctcgatccctgagagtcgcccccttcagcaccctcttcagtgtcccggttctctggctctgctacagacacccggcttagcgtggctccccaacagccccaccttcctgtgcccccattccaacccaacatgacttacagcctgaaccctttgcactcaacctccccacctaccactgtcccctccggcatcaaggctcctaactggaggaagaaaccactgggacctaaagccggccgagggtggggagcagggtgagggctaggtcagagtcttggccacacccatcgttcccctcccttagagtcttttcagacctatcctccacctttcccacccctcccccacactcgcccgtttctctttccctcccgggcctgggcttggactgccaattgctgtgcactctgtcacgcctcactgttccgtcctccctataatctggctctctaaggtggtcgtccatggtccctcaccctgcagtcctgctatctctccccaaagcattgctccctccttcctcccggcaccccttccagccttttgctccttcctccttcatctttggtcatctccccttcctgcctttcctgctttggagcttcctgtttcactccttgtcttttttttgttgttgtttgagaggaggaagtctgtgttacccaggctggagtgcagaggtgcaatctcggctcactgcagcctcgcctcctgggctcaagcgatcaccccgcctcagcgtccccagtagctgggaccgcgggtgcacaccaccacgcccagctaaagtttttgtatttttggtagagaagggttttcaccatgttgctcaggctggtcttgaacacttgaactgaagcaatccccctgcccccacctcctaaagtgcaggattacaggcgtgagccaccgcacccagcccactccttgtcttttcgtttacctttgcgccttgtctccagtctccttggaacccagcatcagcaattaatctttctttcctcttcttaggtgcacactgcactttccccacccaccctgcccagtttcctcccaatcttcctactaccctccaacctcctcatacttctcagattctcacataccctgcttattctggctctctctcatttcattttcctctctccattttttacctc

SEQ ID NO: 88 - DNA, 2415 bp, Homo Sapiens
caaggatgtgggaacaggcaagtaattttcacattggactttcatcctagggagctgggttctagtcacagctctgagctgtgtgaccttgggtaggtctcatctccccggggttttgtttcaccagttgaacagtatgaggatgagtcacagctaacatttgttccatgatatttacccagcaccatacaagtgttatttctgtcctcccagttaacactgacgtgggtagtattatatgcccattttacagatgaggaaactgaagcctgaagaagttaaatacttatcccagaacacacagctggtaagtggcagacctggaattggaatctagttcagtttgattccccaacccatgctcttgaccactatactgttttttcaagtccagatctgaaatctcattttctgtgtggctgtgtgtttgggacaggggtaaccaattcctgactactctatatgctgcatagaacctggagaggatttttcaaagtaaatgaatctcgaaagctggattgcagagcaaacgagtgcagtcaattcagccaggggcttgcaagagggagaaagagaaaaagactgtggaatggaaagtttcccaacccaagcctttcccaaggggtagccattctctgttctacagtttagggcttgcatgtgctttttctggagtggaaaaatacataagttataaggaatttaacagacagaaaggcgcacagaggaatttaaagtgtgggctggggggcgaggcggtgggcgggaggcgagcgggcgcaggcggaacaccgttttccaagctaagccgccgcaaataaaaaggcgtaaagggagagaagttggtgctcaacgtgagccaggagcagcgtcccggctcctcccctgctcattttaaaagcacttcttgtattgtttttaaggtgagaaataggaaagaaaacgccggcttgtgcgctcgctgcctgcctctctggctgtctgcttttgcagggctgctgggagtttttaagctctgtgagaatcctgggagttggtgatgtcagactagttgggtcatttgaaggttagcagcccgggtagggttcaccgaaagttcactcgcatatattaggcaattcaatctttcattctgtgtgacagaagtagtaggaagtgagctgttcagaggcaggagggtctattctttgccaaaggggggaccagaattcccccatgcgagctgtttgaggactgggatgccgagaacgcgagcgatccgagcagggtttgtctgggcaccgtcggggtaggatccggaacgcattcggaaggctttttgcaagcatttacttggaaggagaacttgggatctttctgggaaccccccgccccggctggattggccgagcaagcctggaaaatggtaaatgatcatttggatcaattacaggcttttagctggcttgtctgtcataattcatgattcggggctgggaaaaagaccaacagcctacgtgccaaaaaaggggcagagtttgatggagttgggtggacttttctatgccatttgcctccacacctagaggataagcacttttgcagacattcagtgcaagggagatcatgtttgactgtatggatgttctgtcagtgagtcctgggcaaatcctggatttctacactgcgagtccgtcttcctgcatgctccaggagaaagctctcaaagcatgcttcagtggattgacccaaaccgaatggcagcatcggcacactgctcaatgtaggtttatttttttcccttcttctaccaagaaaaaaaaaattgtctctcttgcatgcaataaagacgttggaaataaactgcattggtagcaagacaaaggatttaatgatttaatgctgaaggggtgtgatatgctggcatgcatattgattccctttgctgaaaatttcctgttagatgttttcttcccaaataacccctcccgcccccatgctcctctccttaccaaccttatagtctcttgaaaacagtttttaaaatatgcataaaaatgtggggggtggggagtagagggtgaccacaagactttaaaacattcttcaagtagggcaatttgacacattttgcagtttttactaaaatgtatgcagagtggaatttaactttgctgttctttggattagctactagttgtataggtccccccaccccttgtgtattccaacagtccaaagtaattaaaatatgacattttccttgaaaggaatttagtttaattaaggtggctgctgctcccgaagttcataaaccaccagttcaagctgccgcttccaatgttttccttgctaaggaaaggcaatatttcttagcattgaccctgctgccacctttccaagtcactttgttggtctaagaagttgctgttttgc

SEQ ID NO: 89 - DNA, 2442 bp, Homo Sapiens
tcctcaatatgtctttgaaataaattcagcttaacttcgaaagtacaaatatggtcaaaggcagcagcagcaaagactttactaactcgtaattcttcactgagttctcgaaggtgttccataatgtccaccaagaagccaaagtcacaaagccattgtttgtctgagaagtggactgttgttgcccctactgaaaccaagaacgcttccatttcttttcttagagagaatattagttttaaagttttccctctcctaagccaattgttcagacatcgtccattaaccctttcaccatgctctgattcagattccgttagtaaagtctgaaattcaggtcgcctaacgcctctggtcttaatcaaaactatccattcggatatggtatttatgatctgattaacatctacatcataggagctcaacagttccaagtgaagaaatcctgaataatgaatgacattccaacagttggggcttacggccttttctctcatgtatgagacgagtcctgagttctcaccaatcatcctcaaagtatgggtcgtggtcagtccaaccattctctgcaagctaagccctgctgtctgcagggactctaggattgccgacatgagcgcaccaacactgaaatgatgagtcaggttgattatggtcagaagatcttcttgcacctccaactcagggcctacaccgcggataaagaccaggaggtagttctcataggccacaaaagcctggtcgtccaaggcaagagaataggctttaaagtccctggctcggttaaaaagctggttgcgtagattcctgtcaatgctcaggatcctctgccttgtgatatctggagataagtcaacgccttgcaggacgcttacatgctcgggcagtacctctctcagcaacacctccatgcactggtatacaaagtccccctcaccccagccgcgacccttcaaggccaagaggcggcagagcccgaggcctgcacgagcagctctctcttcaggagtgaaggaggccacgggcaagtcgccctgacgcagacgctccaccagggccgcgcgctcgccgtccgccacataccgctcgtagtattcgtgctcagcctcgtagtggcgcctgacgtcgcgttcgcgggtagctacgatgaggcggcgacagaccaggcacagggccccatcgccctccggaggctccaccaccaaataacgctgggtccactcgggccggaaaactagagcctcgtcgacttccatcttgcttcttttgggcgtcatccacattctgcgggaggccacaagagcagggccaacgttagaaaggccgcaaggggagaggaggagcctgagaagcgccaagcacctcctccgctctgcgccagatcacctcagcagaggcacacaagcccggttccggcatctctgctcctattggctggatatttcgtattccccgagctcctaaaaacgaaccaataggaagagcggacagcgatctctaacgcgcaagcgcatatccttctaggtagcgggcagtagccgcttcagggagggacgaagagacccagcaacccacagagttgagaaatttgactggcattcaagctgtccaatcaatagctgccgctgaagggtggggctggatggcgtaagctacagctgaaggaagaacgtgagcacgaggcactgaggtgattggctgaaggcacttccgttgagcatctagacgtttccttggctcttctggcgccaaaatgtcgttcgtggcaggggttattcggcggctggacgagacagtggtgaaccgcatcgcggcgggggaagttatccagcggccagctaatgctatcaaagagatgattgagaactggtacggagggagtcgagccgggctcacttaagggctacgacttaacgggccgcgtcactcaatggcgcggacacgcctctttgcccgggcagaggcatgtacagcgcatgcccacaacggcggaggccgccgggttccctgacgtgccagtcaggccttctccttttccgcagaccgtgtgtttctttaccgctctcccccgagaccttttaagggttgtttggagtgtaagtggaggaatatacgtagtgttgtcttaatggtaccgttaactaagtaaggaagccacttaatttaaaattatgtatgcagaacatgcgaagttaaaagatgtataaaagcttaagatggggagaaaaaccttttttcagagggtactgtgttactgttttcttgcttttcattcattccagaaatcatctgttcacatccaaaggcacaattcattttgagtttctttcaaaacaaatcgtttgtagttttaggacaggctgatgcactttgggcttgacttctgattaccctattgttaaattagtgacccctcttagtgttttcctgtcctttatttcg

SEQ ID NO: 90 - DNA, 2319 bp, Homo Sapiens
ttgattcaacaggtctgcggtgggatccaggctagcggggaggactgtaaaagcacccctggtgattccagctggtgtctacccaggggagagcaacctttgcttgctggcgattcccaggggtgcagaaggactgctgggtgtgtggctgcgtgcatattttagcatctgattcactgggtcagaaaagggtgtttgctaaataaagactcaacaaaactcctgcttgcagggggcccaccaaaggttctaaatttttccaggctccctcccataggtggtaatttcccttcaccctaaaggttctggagggggtcatgagtgtttgagaagaggcaagcctgggaagatggactccgaggacagtaggcacaaaccctttctcaagaagggccaaggcattttaaagataagaaacttaaaatcagcgtatttttacatataagcagccacctctgctcatctgtggcccagatacgagtggagtgcgacaagggataaaccattttcgcgcactcttcagcgatggggcgaaagtaacggacctagtcctcgggagctgtccccgccgaccccctctgccgcgacttgacccgcggcgactgcgctgccccttggctgccccttccgctctcgtaggcgcgcggggccactactcacgcgcgcactgcaggcctttgcgcacgacgccccagatgaagtcgccacagaggtcgcaccacgtgtgcgtggcgggccccgcgggctggaagcggtggccacggccagggaccagctgccgtgtggggttgcacgcggtgccccgcgcgatgcgcagcgcgttggcacgctccagccgggtgcggcccttcccagcgcgcccagcgggtgccagctcccgcagctcaatgagctcaggctcccccgacatggcccggttgggcccgtgcttcgctggctttgggcgctagcaagcgcgggccgggcggggccacagggcgggccccgacttcagcgcctcccccaggatccagactgggcggcgggaaggagctgaggagagccgcgcaatggaaacctgggtgcagggactgtggggcccgaaggcggggctgggcgcgctctcgcagagccccccccgccttgcccttccttccctccttcgtcccctcctcacaccccaccccggacggccacaacgacggcgaccgcaaagcaccacgcggagatacccgtgtttctggaggccagctttactgtgctagaggaagagggtccccacatccggccctggccctcctggtccggtttgctgaagcaacacacttggcctacccactgggtggggcaggaagtctcgagccttcacttggggtgaggaggagggagatcggtcagcagctttaccgcccgctctgctctccactgcggagactggggctccggcagaggctggaccgtgatcttgaggttcaggggtgcattctgggtggattcccttggcatgggtggtcggccctcagcaactgcagccctcatttggctctgtcaccctgggctgccaggacacaagtctttccatgcttttcccagtgcttgacttggcactccctgcaggcaggtgggtattgaggatggcaatgcatgtgggggatgtgggagtagggcttagaggtccaaggttctaggataccctcacctgcagcaataccactcattctggcatcgtgagcagcgcttagaagcctctgcactgcagtaagcacagcggggccgctctggagccactgcctctagcacatccagcctgtaggtctcagcccacctgggggaaagtcaggaaggtctgactggccctggaaggtgggggcaccccacccacatccatgcctcctgcatcccctccaccctccctgccatttccacaggccttaccttcgcgcctgcagccgcaggtcctgctctgaggggctgaacacatgctggagctggtgcttggcaattgcctgccacttgcctctgttttctcgctccagccgctcccagatttctgggatctaggagagagaagtggagagtggcaggaaggtgctggtaaagtgggacagtggtcctgagcagctaactttccagtgcctacctgttccaacaccaggtccttcttaggaggctgggtttcagttagggtcagatgggccaggaaactctgcaagtgggccaggttgggcagctggtccagcagtgtgtctgtgaggaaggcccgaagctgcaagggtgtccagtggaggccagtgtgatgcaggtgctggccagggggccaaggaaaaggaaggggctggg

SEQ ID NO: 91 - DNA, 2441 bp, Homo Sapiens
ctgtcctccaaaatgttgcctaccacaccaaaacacaatcctgctttttaaacagcgagtaaaattaaatcaaccttatcttcctaaatagaagtccactcaaagttttttcacaaaaatgacattcacttgacttaatattgtccttccaataagaataacacgcagggtgttagagggcagttgttggactcctcttcagcaaataaaggagaccagttagagcttagcttggtctgcccaggaaaggaggaacgcagcttgctgacatggctaaggaatgccaattaatacattttaaaacccctatcatcttgcctgagacgtgtacatcttcccaggccctcaaagttcaatcagaaagtgtattcaactccattgtcatttcacccatagtggggaagtccatcgaggaaaaccatagggaaataaaatgtttttcagttattcatattagcacaatcaacccagagctcacggcacaaactaaataagttaacttgccagtgtcttgaatgaagacatttaatcaaagcatgcattttccaactttccagtagctttcaggacagttggttttggtgatcgttttttggtcttttattgttctcaacacgactggtttctcaccgcaggatttcaaacaaaatgagacaattaaaccacacctcgagcgaaggggcgcttaccttgcagataaacacaccggccttgccttctctaaaatgcggacacgtgcttttcccgcattagggggggtctcccggcgcgcgccccgccgccacctgttgaggaaagcgagcgcacctcctgcagctcaggctccgggcgccagccctgccccgcagccccagagcccgtcgcagctcgggtggtccctccccggcccagcgctcgccgcctgctcttcgccctgcaagtttcaagaggcagttatttctcgcagcctccgcgcttgcaactgcctcctggcgggggagtgggtgtccaaaaagccagcagctggagaaactgaaaagatcacaagcgacttaacgataagccccttcttccttttaaagaccgagaggagggtagaggggagtagtgcctgagcccacgtgaccgagccagggagcccgacggtctcaggaacgcccgacgccgcgcgtgacctctaagtgggagcaccctcgaaccgactcctggtccacccacaaggatagtggcgcacagatggcgctccccgcagccccagtctcagatttaagaggtctggagtagggcctgagaatatgcatttccaaccaggtcctgggggatgccgacactgatacagccagtctggggaccacacttcgaggatcacgtcctcagcccctgactcacataagtgtcattcagaacagatgtctgattctaaggagccagtggtgaaaccagagaggctttgggtttgtcaaatccccagcagcaaacgtaacctcgggccctggagtggcaaagccgtggactagaggtggagggagtgggttctcagctctcaagaggtcactgggaaggcctttcgcgttagatcaaagatcccaggtacttcctcgaactcacttgaagtggcaccggggagacctgtgcctccggccacggcgcccttctccgctggaggcacctgcccacccctcttctcgggcgaaggcccctcgcgccccctggtggcagccccagttcccccagcttaatggggtgttcccctcacccaccccagcaggagccccagggtgcgagactaggaccacagtcttaactggctttaaggcagctgttgctgatgaaaatgaaaaggaaagtagcatgtgacccacaggccattgtgagaaccccccagtgtcacatctgtgcctaattaatcatcaaaccatctactcaggtggcataagggacatggtttttgagggttgtgatccagatctctaatagaggaagacgagggggggcatttggagggaaagttttacagtaccagcctcagctgtttggtgtttagccaaaatagagagacgcaagtgtgctctgggttgataaagatgaggtccacaggtaatgaagacaggctccaaagatggagaagcatctgcttcatcagctaaacaatagctgtgaaaagtctccactgccccaccctaagtccaattttcattaaagctgagagtcctggtttctctcaggttgaaaggcagagtctccctgtccttgaggcagagaagttagtttggacgggaagagtgtgtcgctggcaaataactgcagcagacaacatgccaatctcagcctccctgtctcctgtcctggggtctctcaaagtacccagtccccatatgctcttcctccttgccaccttatggagaaaatgttaaatgatggtttaaaaaaatcagcttcatggccaggcatggtggctcaca

SEQ ID NO: 92 - DNA, 2483 bp, Homo Sapiens
acatcaaatccagaaaaacagggtggggacacggcagggcccagcagcaccatcccctgaacacccacaaacactgtcccttcctcagcaggtggagccatctgctgtcctctgctcccatgtggccctcttcatacctaaagatgggaccaggatctgtgctggagaacagtcttatctccctccctctaccctgtcctggcacaatcaacgaacactttttttttttaaagacagagtttcactcttgtcgcccaggctggagtacaatggcacaatctcagctcactgcagcctccgcctcctgggttcaagtgattctcctgcctcagcctcccaagtagctgggattacaggcacacaccaccatgcccagctaatttttgtatttttagtacagatagggtttcaccatgttggtcaggctggtctcaaactcctgacctcaggtgatccacctgcctcagcttcccaaagtgctgggattaccggcgtgagccaccgcacctggccgtcaacacacaattaaatcttaaacacaaacctgcatattggctgaccacgtgcacctgcaaaacccttacctcccacccccaggaagagggggttctcgtccccacctctcattcccacccttgaaattgcgaagaggattataggtaacctgcaggcaccctcgccagagcgtctgtgcttccagacacttctccccattgccggcaacccggctccactgccgcgcccagcctcctctgttcactgctctggcctcggcgcctggaaaccgcgtgtccatcaaaacgtgaaggtgaacctcgtaagtttatgcaaactggacaggagggagagcagaggcagagatcaccgtgtccactcgacgtcctgagcgaaaagccacgtgtgcccacgtgacgatggagacaggaggaccagggctctgcctgcccccttttctgagcccctactgcattcagctctggggcctgggccctcgacggccaccacctcctcacctgggctcctgcgcagccaagcgcagtcccgcacgctcatcttccacgtcagctcctgcagcgagagcttggcatgcttccccagggagatgaacttcttggtgttcctgaggaagcggcgttcgttgtgcctggagccccagaggcctgggggcaccagccggcgcaggcaggcccgcacgaagccgtacacctgccaggggctgctgtgctggcggagcagctgcaccaggcgacgggggtctgtgtcctcctcctcgggggccgccacagagccctggggcttctcccgggcacagacaccggctgctggggtgaccgcagctcgcagcgggcagtgcgtcttgaggagcaccccgtaggggcactgcgcgtggttcccaagcagctccagaaacaggggccgcatttgccagtagcgctggggcaggcggggcaacctgcggggagtccctggcatccagggcctggaacccagaaagatggtctccacgagcctccgagcgccagtcaggctgggcctcagagagctgagtaggaaggagggccgcagctgctccttgtcgcctgaggagtagaggaagtgcttggtctcggcgtacaccgggggacaaggcgtgtcccagggacgtggtggccgcgatgtggatggggggcccgcgtggtgctggcggcccacggatgggtgggagtggcgcgtgccagagagcgcaccctccaaagaggtggcttcttcggcgggtctggcaggtgacaccacacagaaaccacggtcactcggtccacgcgtcctgcccgggtgggcccaggacccctgcccaacgggcgtccgctccggctcaggggcagcgccacgcctgggcctcttgggcaacggcagacttcggctggcactgcccccgcgcctcctcgcacccggggctggcaggcccagggggaccccggcctccctgacgctatggttccaggcccgttcgcatcccagacgccttcggggtccactagcgtgtggcgggggccgggcctgagtggcagcgccgagctggtacagcggcggcccgcacacctggtaggcgcagctgggagccaccagcacaaagagcgcgcagcgtgccagcaggtgaaccagcacgtcgtcgcccacgcggcgcagcagcagcccccacgccccgctcccccgcagtgcgtcggtcaccgtgttgggcaggtagctgcgcacgctggtggtgaaggcctcgggggggcccccgcgggccccgtccagcagcgcgaagccgaaggccagcacgttcttcgcgccgcgctcgcacagcctctgcagcactcgggccaccagctccttcaggcaggacacctgcgggggaagcgccctgagtcgcctgcgctgctctccgcatgtcgctggttccccccggccgccctcaaccccagccggacgccgaccccggggaggcccacctggcggaagga

SEQ ID NO: 93 - DNA, 2374 bp, Homo Sapiens
tgaaacccagagaggttaaaggatttcctcaaggtcacagagctagcaacaaacacagcccttactataaccttgtctactacagccttgtgtgttcgctctttccacagccacttccactacaccagagcctgttccagcacatgattctatttaacagatttctcctcttcttttttttcttaagcgccaaatacatgttaccaaaaaaagtgacacactgggtagcattttaaactcaagtgttttgccaactaaaactatactcaaatttcataagtatacaggcttagcccgtaaaacagaaaggcacaactattcatagttctttaagttccttttgaaattggtgtgtatgccctggaagttttaagaacaaccactgaaaacctattcaccaattctgaatggcttgtaaagtatcagcctcactttcattcttttcagagcccacagttatctcctccctggatatactttatcttgcagattatgcaaggcaatgtaactaacttcaaagtccctttagttccttttaaagcacaagaaaatctcccaaaacactgaacataaaattaacccttgggaagtttcagattctgagaacaggaaccacctcttaaccattctctctgactgcgatcatctaggtccttcattcaaaatgcattaattggaaatacctaaaagaaacgtgggagggggccggggggtcggaagaaagtggagaacagacatttacatatataaaaaaagggatctgatatatgaataacacttttgcccaacgtcaacttctcgcctcgactcaaggcctgacacaacttctgttgtcttcttgatcaccttccttgaagagaggggccaaagccggcacgttctgcggagactgtctctagacctaggaaggggcacaccagggcagcggacgatttgctccgcgtctctcaaaactactgccagcccaattagtaaaccgagagggcagccctgagatgcaggatggccagagagttgaaatgagtctgggagttaagagtgggatggggcggacgaacaggcgtggggagggtaaacaacgcaccaggagcgggagtgagaacagggtcgaggtggggtcagcgaaaggcaaaaggcgaagagaagaaggggacggggctccgggtgggatgggcggcagcaaagggggaggggacgcgagaaggctgggggagggggagaagggtccggggcggggcggaagggagcaaagaggcgggatgaagacggccaggccgggagggtctttacctgcagctccgcccgctccacctcccactgggctctctccacctcgaagcgggcccactcgtgctgcaggaagtgcaggatccccgggagactgtactgggctcgggccgcccccgccgcagccgccccgtcgccggccgcggcagcctccgccagaggcccgagccccttggcaccgccggcgcccgggtggttgttgctgaagaagacgccgggacccgcctgctcgtccatggcggccgcagatacccggggagctgccccggcgcccagcagcggaggcaacagcggcggcaagcagcgcctcctcctccctccgccgctcccgcccacaccccagtcagcagggagcagcctcctgggcgcgggggccggccgagcccgtgacgggccgggaaatgggtcaactgcggcgcgctggcggcccggggcttgccgggaaatgtagtcgcggggcggggcgcgggctagcgcggcccgggcggcctgtagggctgtgcctcagcttgggcgtggcctcgggcccgccccgccccggctcgccgcgtagggggccggctgggcggggagagcgggtttcctctggggccggctgggcgcgggcgggcgggtctccagtcttcctcgcacgcggaagttcgcgggcggcgcaccctgttgcattcaaaaacacacacacacacacacacacacacacacggaagttgtcacgccaagatacctgcccgagctgcacatcttttaaggcttcctggccgttctgtgaaggaacaggctcaaagcgagctacccggtgcggccgcgggaccggggttctcccgccagctgccctgcgtgctctcgcttcggcttcgtgttcggagtttctctcaccctagacgctcctccattctgccaatctgcgggtcgctgtcgctcttgcctttctcttttgactcgaggggctcaaacctgttacctgaccagttttcatttctaaggaacgccgatcacctttctaagacaacgccgcagctttctgctgctgcttccaaattgtggtttgttgacagcccatctgaaaaactgctccgttgaagtttct

SEQ ID NO: 94 - DNA, 2414 bp, Homo Sapiens
gcgtgtatttgcaagtccagactttattttcttctttctttcttttttttttgagatggggtctctgtctgtcacccaggctggagtgctgtcatgtgatctcggctcactgcaacctccgcctcccagattcaagcgattctcctgcctcagcctcctgagtagctgtgattacaggcatgcaccaccatgcccagctaatgtatatatatatattttttattagagatggggtttcaccgtgttggtcaggctgatctcgaactcctgacctcgtgatctgcccatcttggcctcccaaagtgctgggattacagacgtgagccaacccacccggcctatttccttatttcatttacagcaagcttggacttgtttggaataaaataaacaatcaaacataatctcaaagacatttctgctgaacagtgtatcctggggacaaattatgcaaaacaatacaaatcaaagaaataggaaggaaaaacaaaatggtcagaaggttgacaacaaagtgcatcacaaaaacagtcttcaaagagtttgtattttatttttgcccacaaataattagctagttagattactgtttgagaacctataatttttagaaagtggactattttcttcaatactaagaaatcagggctgtgcacggtggtttatgcctgtaatcccagcaggccgggattacttgagctcaggagttcgagaccagcctaggcaacatagtgaaactccgtcgctataaaacaaaacaaaacaaaacaaaaaaccaaaaattggccaggcgtggtggcacaggcttatagtcccagctacttgggaggctgaggcaggaggatcgcttgaggcagaggttgcagtgggccaagatcgtgccactgccctccaccctgggcgacagagcaagatcctatcttttaaaaaaaaaagtctgtctggaagtccttactttatatttaattgtcaaactcctttcccccatctcttgacttcacctctctctacatccccaagccaagaatgatgagaaatggacagatgttagcacgagttgggtgcgctttgggcatggggaagtctgaggtctcggaaaatcttttctacatatacacccggccctcactttctggacgcacgcagcaaactctcaaaataaaaccaccaaaaaggagaagggggggcgtcgcccaccgctcctggcattccgcggctgccaactctttccctcccatctggctcctgggatgcccgcgggggaatcgcagtgagcagcgcggggcgaggccgccgcggacgccccgtcggatgtgcccttcgctgggccgagcggcgcagggttggagagggaagcgctcgtgcccaccttgctcgcaggtgcccttgctgacctgggtgatggccttctccccgcggctctcggccctctggctggcggcgcgcagctggcagccgctcgggtaggtggtgccgtcgctgccgcacaccgggtagcggctcttgcacacgcacacgccgcttacacccggaccgccggctgctgccccggctttacccttccgcctcttgcggctcttcacgcactccatgcccggcgcgcagtaccccctgccggcgccgccacccccgcacggctcgccctcgccgcgggcgcacatagggcagcagccgcacgcgtcgcgggtctcgcccagcaggcagcccagcgggggcaggggcgggcaggaggccggctcgcaggggccgcaggtgtccgaagaggaggaagaggagaggggcaggagcaggagcagcagcccagcggcgccgaggagcagggcgcgcagcgacggccgctccatggcggggtgcggtggcagcggcaagggcgcgagtgagccgtgtcgggccggccggcgccttaaacccgccgccccgcccggcctgtccgcgggaaccacaccccggggcggtgagagcacgggggccccgcccgtgccgccctcccggccccgcggggcctgcgcgcgcgctcctgctggcgtcggggggtgagcgggcacccggcgtgaccggcccatgggcgctcggtctcacgcccgcttcgcagagctcaccccgccagctcctgctcggtccccagtcccctgccccgagccctcagggatcgcaccgcagtgcgagcggctcttccaccctctggtttctccccgtttccggtcaatatatttaaacttcttaacaaccacggcttcgagacgatccagggtttcatctattaaatcctccgtgggcctgagacacctgagtgctcattactctgtggtttgggaagctctcttaagaacaagctgttaaaaacccccacttgtggactgtgtccccgctggccacaggcctgctgtggtcttgggtgtcaagcactaaaagga

SEQ ID NO: 95 - DNA, 2479 bp, Homo Sapiens
tcatccagctgaagacagaagcattctgaagaagtctgtctttgttaacaatatctaaacccagagaagaaattctgctggacttctgggaggcgagaaggagaagcagaggagaagctgccaaaatgacactctcccttccatccccccatggccaaccccccatcccagggcctgataaggaggtatgtcagtccccagcaatagaggccctggcacccctctgttccctaaggcaatgagtagaatccttgagaagacagctacgtgaagagtgtgcctcgggaggccagacctgaggcaggaggtttccagccctcactggcggccctggggcagacagctacaaggattcaataaatcactactttgataaactgaaggtcagaggtgggttcctcatcttccagaggccatgaaaatctccaggtcctaggacacactccatgggggaaggggaagcacctaaatcttactgacatgaaattttcctctaggttggcagaatggggactggagtccgttttcattatggggaatgaaaacagtaatgcttcttgcatagttgacactctgaggtgaaatgcagacttgtggggcacctcaataaagtgcagaatcttagaacagtgcacatctgtgctatagactagctacaactgctggaactggagccaatctagttttcaaaaaaggccaccgcttcgttagagagaggaccatggactctgcatacgctctggtgacctagggtggaggggcggggtggcggggagggcagcaggcttatgctttaaacccctgaggcagatagagaaggaaggaaggaaacaagggcagatgttagagtatactcacaagattaactcctctgattcctatgcaaatacctagaaagggagagacacacaaagttatctttaaggtctttatcttgagctctgaattgctaaaacaaacaaaaacacccaagtggggggggaacggaagtctacttggaagaggaaagagagcagctggtgctgctggagtcatgagatccaggacacccccgtttcccaagcctggatgtgcctcccagggtagcatgctggcacggagcgggatggctgatttccataagatggaaatgattgcatgctggaaactgagatgctttaggggagagaagatcctaacccaaaagaaaggatataaatctttaatgtgtcaaatttgttgactgtaagatgttgtagtaatggtcagtacttgcagcaccaaatgggcacgtctaaggggtccgggctttgaaatcagtcacgttatccaaacaaattccacttgagttccgtggctgaatgtctgagaccttcagaagaagcttataaagaccctgctggaaactgaagaggattttagatacgccaaagatatgccggccattacgcagagactagaacttttagtgctgagagctctggctgggagaacctcacattcctaagaatcagcaaccaagggaccccatttttctgccaaataggcacactattaaatctgatgggcatgtcaagggagaagatgacctgggaaaggagttgcccagggagcaagtgccctgttgcagaggcagagattgccaagatggtctccttggggtttgaggcacaaagccccctctagctattttagttataaggaggtgggaacgctgtgttaaattgtacccaagaagataactcacaaggcaaggaacacggaagctagggtgtgttgggcaagtaagcagaggttgcttgctttaccgaaagtggggctgctctggtctcacaagggtctagccttggttggcacatgcttcccttgtcacaccagacaggtgagaccaagaagggaagacagaaagagaccccaccacttaacatgggcaaatacctacaggaggctactttccaatctgtggtgcccagaaacttggcagggatagggtggttgcatggggagggatgctagagaatggagaacgagttcactctattggcccaaactcaattttcatgtggcttcctttaaacaaaccacaagcttagtgagtcagttaggtcagtgtagagagatatttccgcatgctagaggcagatccatattggttccccagtctgtttttggacggttccccttcattctaatcacaatgctgctgccaggctgattcttctaacatgcaaatatgttcctgtcacttgcctgtttggaattcttcaatggtcccattaggtttctgtcgactgcaacgaaaagtcttgtctaatcagaaccactgaaagttgttaatcaggagagcaatatgttcaggcttgtgttatagaaagaaactgagagagcagacatacagattatcctcctggatttatcagttatatacattaaaatggccaaacagtaattcaaatagcaaaacaaacaaaaaacccaactgtgcacacacacacaccaa

SEQ ID NO: 96 - DNA, 2243 bp, Homo Sapiens
aaggtgctctgttaagtgaccttggggagagcagtcccctgccccagcctcactctttcccgtcccagcctctaagggcactgcctaccttagttctaccccagggcctcaaaattggccctcatgcttttgttctcttctttctctggcctcctctcctttcttctccttttccaccaaactcatcttctgggtatcctactcttggtcatctagaccctttggtacctagtagcccacagttttttttcagatttgctaatgagtcttgtttattgcaaagagggctattgatttctactaacaatggaacttctagtgctttcccagtaatctcagggatgttgatgtggggcctttgggaaacaggacctgagcatgtgagtttcagtctcacagagagagggtcagtgagtgctgggaggggactgtgcactgccctcaagctgcacactttgctgaccatctaataacctcctttatatctgtataactctttcccattttcatacttttttgcctaccatccttagattcacatatgatccaagtaataaagccctatttgcaaatgggaaattttttaatcagagggtgagggtgatctgtccaaggccacatagcaaaatgtatcctccaacattgagaagctagacaccgactcacacaggcactaaggaagttggggaagttctccttcatcatcgtcagcaggcttggcttctcaatcttgtcatcacgtctggtgtatttgtgaaacatgtcgatcatgcctattatggacctctcagcttgagtgttgctcatctttgctttcaaaaagccttcaggaaataaagacaatcatttttttcccttcatttaagttagggtctctatttgggagtgctggaaggagggctgaggacagagtaaaaacacggataaggtgtagcagaacgaactcaatttttttttaatgtgatgggataagttgctcaaaaatgagagggtaggaccaagtctgagacctggcccatcctggccagggccaagaggagatgcaggtggatggcggaagtccagctgtggacagtgcttcagagagggagaagcagggagagtcgggcgccagcaacacatggaagaactaagctgggacaccccagcctcagccagcacatggcagaccccactcttaaaagagcaccaaatccatctcctccagcttcacagtcggggtgacagtcatgggggcaggacaatggccttggtgatctggtgtctgaccctcctcggctgcttcaggaaccagacaccgtgggccccaccttgactcaagtgcaagccctgcatgacacggtgtgtgcaggctccaggtgcacatgtgagcgtggacgtgagtgttagcaggaaacacagtcctgtcccgagcacagggggcccttcttgtattcccttgggaacgagaaacaggaatggcctctgttacaaggaacagaaataactctctggttcttaagctgctggacggggtgggagtgaggtgggagtcacttcatgtctgctcttgggaattatctgcaccctctgaatcaccaagccttgactgtttaaataaaaatgtctgacttcccaaagcagatctttcagccagtagtcagtctgggctggcctgcaccccaagcctgaaaaataggacagtgcagttctcacttcccacactttccaaagaaccaggaaaggaccttggctaatgcatatgggtgtctgacaataaacccccaacacctctcaatgcaggagaaagctccatgccggcaactgactaagaggagccacccagagcttttttgaatctgaggccaaggccagagggcaagccctgtgcccagagggtgactgacaatttgcaggttgtggtagggagtgacggagcgttggtttctcaataccttacccaggtaggggcaagccatctggccagggctatgctgtgtcggggtcccaggcctgggggtttggagagcctccaaagcattcacaggggacccctagccctccaccctctgtggagctggagctggggaggggatttagcaaccgggaccccaacaggaggatgaatccagggaggaagaggacagggagggtcctgtgctcaggtcccactggggacatttccacaggagttgcctcaggagatcccaaaggagcaatggacaggtctggttcagccacctggttatacagacgtgggcttt

SEQ ID NO: 97 - DNA, 2279 bp, Homo Sapiens
gacttgcgcacaggagcggggtgcgggggcgcagggagtgtgggtaacaggcatagattccgcttgcgcaatacgtggtaagaaaccagctgtgaggggctggcccaacgcagagcggcgcgaggtccgcttggcatctacaacaatcgaggggctagtccagaagttcaaggcggggttacaggttggggaggaactgttaaactgtggactttttctcacctgttggaataagcttcaggcaaaactttgccaacaaaaaccggtccaactgattttagacgaaagtccaaaagcagtttaatgcaggacagataatcttttccacaaatgatactgaaaagacaggacatctatagattcccccccgccaaaaataacccttacataaaaattaagtggctagatataactgtgacgagtaaaattacaaaacggttttaaaaaacaacaaactattgtctaaggctaggcaaaaggttcttaaattgacattagtggcaagaccggtaaaaagaaatgttgatgaattagactccataaatttaaaacttttgctttgtgaaagaccctgtaacgatactgaaaaggtttacctaggagaaaatatttacaagccatatatctggcatacaaccagtatctagaatatgtaaataactcaaaaatcaattatttttaaaaatccaattagaaaatagtcagaagacataaacagacacttcactgaagatatgcagatggcaaataaccatatgaaaacctttaatgtcattagccattagagaaatgggaatacgaggctttcgttgttcttcgcctcccactagggcgggttgagggtctggctccagtagccccgggtgcctctcactccttgggcgcaatgctactatcctggcagaaccctcgccgaaccctcgcaggacgccccatcgggtccgccagcggctaggaagcccgattgtgtcgttcctttttccctctgcgcctcccaccgccagtcccttttccaaatgcgcctgcgtctgccctccacatctccgagctccgtctggcttctttctcccttgcctgtgagcgcctggcggcggatgcattgaaagctgcgcaccaccgcctaccgagcgttttggggagtgtgtggaagttgttggcagcaggttttgacagcagtaccctatgggcctagtcgttgacggtagcacctggttttgtgtgccccagccagctgaggccagggtgtgtggtgtgggccactggtactgctcttctgccactataatccctccccctaccaggtacctggtgcgtagaagtctaaagacctgtgaggtctagcctggcgcctgtaatcctagagaataaggaggttgaggccaggagttagagaccagcctgggcaacatggggagaacttgtctctactttaaaaaaatttagcccagtgtggtggtggccgcctgtagtcccagctatttgggaggctgatgtgggaggatcacttgagcctcccacatcaaggagatcgaggctgcagtgagccgtgatcacagccactgtactccaatctgagcaacaaagtgagaacctgtctcaaaacaaattccaacctgattctggtatagcatcacatgacaggtagcagccctaagggcgatcaaagtattttaccccaaaatatatttctgacatattttggaatggtcctgtgcaaagctatcttttgcgagggaaatttgtgttctgtggacaatctccttccctttccaggtctttctctgatccgggagagatttaactaagagtctgacaccgtttaaggtcatttaccttttgaggtacatatgccatctattctttctgaagcatattacaggcttcacatatgtaacaagaaccctggcttccacaacctccctcctgccaccactggccaaacccctcctcctccaaaatgtaccggctttccaggtcaaaccaatgtataccttacatatattgactgatgtttttgcctgtatcttctgtcttcctaaaatgtataaaagaaaactatagtccaaacaccttggacacatgttctcaggacctcctgatgctgtgtcacaggccgtggtcactcatatttggctcagaataaacctctaaatattttacagagtttggcttttttcactgggtttccccactcattttattggcattagctcatactctttctgtccaatcatatttctacattgctgtctatattttattaatcctaagttaaaaat

SEQ ID NO: 98 - DNA, 2407 bp, Homo Sapiens
gggcgagtgggtgtgtgcggggtgtgcgcggtagagcgcgccagcgagcccggagcgcggagctgggaggagcagcgagcgccgcgcagaacccgcagcgccggcctggcagggcagctcggaggtgggtgggccgcgccgccagcccgcttgcagggtccccattggccgcctgccggccgccctccgcccaaaaggcggcaaggagccgagaggctgcttcggagtgtgaggaggacagccggaccgagccaacgccggggactttgttccctccgcggaggggactcggcaactcgcagcggcagggtctggggccggcgcctgggagggatctgcgccccccactcactccctagctgtgttcccgccgccgccccggctagtctccggcgctggcgcctatggtcggcctccgacagcgctccggagggaccgggggagctcccaggcgcccgggtgagtagccaggcgcggctccccggtccccccgacccccggcgccagcttttgctttcccagccagggcgcggtggggtttgtccgggcagtgcctcgagcaactgggaaggccaaggcggagggaaacttggcttcggggagaagtgcgatcgcagccgggaggcttccccagccccgcgggccgggtgagaacaggtggcgccggcccgaccaggcgctttgtgtcggggcgcgaggatctggagcgaactgctgcgcctcggtgggccgctcccttccctcccttgctcccccgggcggccgcacgccgggtcggccgggtaacggagagggagtcgccaggaatgtggctctggggactgcctcgctcggggaaggggagagggtggccacggtgttaggagaggcgcgggagccgagaggtggcgcgggggtgccaccgttgccgcaggctggagagagattgctcccagtgaggcgcgtaccgtctgggcgagggcttcattcttccgcggcgtccctggaggtgggaaagctgggtgggcatgtgtgcagagaaaggggaggcggggaggccagtcacttccggagccggttctgatcccaacagaccgcccagcgtttggggacgccgacctcggggtgccgtggtgcccggccccacgcgcgcgcggggctgaggggtcgggggcgtccctggccgcccagctttaacaaagggtgctcctctccaccccgcgaggaggggcagctccggagacccggtcttcagcgagcggggtcttagcgccggggaggtctacttccttttggggttgccattttactattattattgccttttttttttcttcaaaaggactggagactgatgcatgagggggctacggaggcgcaggagcggtggtgatggtctgggaagcggagctgaagtgccctgggctttggtgaggcgtgacagtttatcatgaccgtgttcaggcaggaaaacgtggatgattactacgacaccggcgaggaacttggcaggtaaagggggtaccagaagcgtaccctcctggattgtggaaatgcataacgatggggccattgggtggtaaacaaatgcagtttgaatcaggcgtctccctcgccctttctggagatgcgcaaatcatagagaaaagagttactaacccagcggtaaaccgcctgatccaagggcctgggggtggaggagaggcagcagttcagggctagattatgatgcacagtatattgatccagtcccctggacaaaatcagatttaattgtccgtgctaactcttgtcagcccttgcccttctgtgacaacaggacaaacactaagattataattgcaattggagttagcttttatgtgtgatttaaacggagggtacaaactaattaataggttttaaaaatcttagtactttaccctctatctaaattttcagtgtaatttgagcaagtattggtaggtggtaaatggagacttgccagatgttgacattgggcttggattttgaaacttcttccaaccaggaatttaattacctggttggtgttggtggttgctttggtttcatttacaatgttaaatttttaacaaatcaatgagagtctaatatggctatctggattcagagcatacctccattgctgtagcagctgtgattctcagtgtaaaatctttcagtttctaggtaaacaaagaatagtttctttcggggcatctaagggctgattgctgtttcctttgactgtgtattagacagagtgttttgggctctggtcaactttagtagaaaacctagttttcatacatacatttaaaactgaatttatggaatttgactgtggtgtatttacattgtgagtggagtaggcaaaaggatctttaaacaaacaaaatatgtatttacttatatgtgcattgaaata

SEQ ID NO: 99 - DNA, 2485 bp, Homo Sapiens
ggggagagcactggcagcacaaggcaaacctctggcacagagagcaaagtcctcactgggaggattcccaaggggtcacttgggagagggcagggcagcagccaacctcctctaagtgggctgaagcaggtgaagaaagtggcagaagccacgcggtggcaaaaaggagtcacacactccacctggagacgccttgaagtaactgcacgaaatttgaggatggccaggcagttctacaacagccgctcacagggagagccagaacacagaagaactcagatgactggtagtattaccttcttcataatcccaggcttggggggctgcgatggagtcagaggaaactcagttcagaacatctttggtttttacaaatacaaattaactggaacgctaaattctagcctgttaatctggtcactgaaaaaaaattttttttttttcaaaaaacatagctttagcttattttttttctctttgtaaaacttcgtgcatgacttcagctttactctttgtcaagacatgccaaagtgctgagtcactaataaaagaaaaaaagaaagtaaaggaagagtggttctgcttcttagcgctagcctcaatgacgacctaagctgcacttttccccctagttgtgtcttgccatgctaaaggacgtcacattgcacaatcttaataaggtttccaatcagccccacccgctctggccccaccctcaccctccaacaaagatttatcaaatgtgggattttcccatgagtctcaatattagagtctcaacccccaataaatataggactggagatgtctgaggctcattctgccctcgagcccaccgggaacgaaagagaagctctatctcccctccaggagcccagctatgaactccttctccacaagtaagtgcaggaaatccttagccctggaactgccagcggcggtcgagccctgtgtgagggaggggtgtgtggcccagggagggctggcgggcggccagcagcagaggcaggctcccagctgtgctgtcagctcacccctgcgctcgctcccctccggcacaggcgccttcggtccagttgccttctccctggggctgctcctggtgttgcctgctgccttccctgccccagtacccccaggagaagattccaaagatgtagccgccccacacagacagccactcacctcttcagaacgaattgacaaacaaattcggtacatcctcgacggcatctcagccctgagaaaggaggtgggtaggcttggcgatggggttgaagggcccggtgcgcatgcgttccccttgcccctgcgtgtggccgggggctgcctgcattaggaggtctttgctgggttctagagcactgtagatttgaggccaacggggccgactagactgacttctgtatttatcctttgctggtgtcaggaagttcctttcctttctggaaaatgcagaatgggtctgaaatccatgcccacctttggcatgagctgagggttattgcttctcagggcttccttttccctttccaaaaaattaggtctgtgaagctcctttttgtcccccgggctttggaaggactagaaaagtgccacctgaaaggcatgttcagcttctcagagcagttgcagtactttttggttatgtaaactcaatggctaggattcctcaaagccattccagctaagattcatacctcagagcccaccaaagtggcaaatcataaataggttaaagcatctccccactttcaatgcaaggtattttggtcctgtttggtagaaagaaaagaacacaggaggggagattgggagcccacactcgaattctggttctgccaaaccagccttgtgatcttgggtaaattccctaccacctctggactccatcagtaaaattgggcgtggactaggtgatctcatagatccttcctgctggaacattctatggcttgaattatattctcctaattattgtcaaaattgctgttattaagtatctactgtgtgccaggcactttaaataaatattgtgtctaatcttcaaaacaaatttgcaaggaaggtttttggagataaggaaactgagactcaggattaagtaacacacctaaagtcacaggtgagcttggaactgaacccaagtgtgcccccactccactggaatttgcttgccaggatgccaatgagttgtagcttcatttttcttagagactttcctggctgtggttgaacaatgaaaaggccctctagtggtgtttgttttagggacacttaggtgataacaattctggtattctttcccagacatgtaacaagagtaacatgtgtgaaagcagcaaagaggcactggcagaaaacaacctgaaccttccaaagatggctgaaaaagatggatgcttccaatctggattcaatgaggtaccaacttgtcgcactcacttttcactattccttaggcaaaacttctccctcttgcatg

SEQ ID NO: 100 - DNA, 2354 bp, Homo Sapiens
ccgcgcttgccgctcggcggctgctgccggtctggctcttcctcgctgttgctcaggctgtcgtcggccggcgagactggcgagctggacacgtcctgcatcatctctcgagcggcgacgcgtggcctcgcgggcccggggcagaggagaagagcggggcgcctcagcccgccagcttcccccgcgcgcggcgccggcccgggcgatgcggcccgcggaggagagagcaggaggacggacgggagggacctccgcggggagggcgcgcgggggaggcggggagggaggcgggagggggaggggacggtgtggatggccccgaggtccaaaaagaaagcgcccaacggctggacgcacaccccgccaggcctcctggaaacggtgccggtgctgcagagcccgcgaggtgtctgggagttgggcgagagctgcagacttggaggctcttatacctccgtgcaggcggaaagtttgggggcagcagtgtcattggcctgacgtgaggaggagggacttttcgaagttttataggaaagtttccgctttccagtccccctcccccgtcccacctcccttcctcggggtctaacaattcgtcctcccaaaccattcaaaaacgacctggcccgggcggccggcccctccacccgcctcctagccgccctcccccttccctccccgtcgccttcctccggcgggcgcggggcgatttccttccccgccggagcgtgcgggcagcgcccccgaaccctagcgcagcccaggaagcggtcggaggagactgtcctggccgcggtggcagccccatccggagtggctgtgacagcagcaatggcaacagcttctacacagtgggtgatgtctcatctcgcccaagagccctctaggtccgtggggccgatttgggattgctggggctgggggggtggtgtggcgcggggtgggggggcatgccaagaaaagtgtcaaccgcggagcccacccaatggtcaggtagacgaaccccttggagttccaaaggccaaaccgcggcggcccagcccggaggtcctgggcgtttctgaagacgtggccgcgccgcgggggctgaggatttgcgtcccggcctgctctctcgcccttctgggccctcctttcccctctacaacgacccagtctgacgctccccaacatccaaaggactacgcctcggaaggtgctcgaaagaggcagaagttcactcttcggtggaaggaaacccagtccatgggaaaggcagcagagccagaggggggcagcgcagcgcctttgctgcggccctaacagctggcaatgccaacccaagggagagaccctgtggccatttcatccccacccccaaattaggctccgcattgtgaccttgaaaggccagcttgtaagagagtgaagtgggaatttgatagcgcctagacataggggctgcccgctctgagaccccccccgccccagcccccactatctagggcatccagtggacaattaggcttcgtgagccccaattccaaatgcttggatacgctaacattttaagcatttctgtctgtaagttaaaacgaagagccccaaagagggtgttaatgtagatcctggcaaactggaagcagcaaagttggtgaaccagaaaggaagtcgccttggataagaagcccatcttttgcaatgccatacttgtttcctttttgaaatgaattgaggtaaaataaccgtttcaggtccatcccttacatggcaaagtaaaaagctggagtcagtacacagtgttggggtgggggcagcgtttgggggcgacgagttttgtgcaccgcgctggagtaccctgcacataaggtccgctcatgggcttctcagtacggactcgccggcgggaacaattaattgagcaaagcgcccctttctgggctggagcaaggttcgcggctgcagatatctcaagctgaaggcaagagcccaggcgaggcgcaggcaggccacgtggctgttccctgctgagactcgcagctttggtcttggaaacctcagggtgtggagctgcttgggccgactgaagggttcagctttttgggagaagtgagggcgagtgttatttctccagcgaggtgtaaacaagactgtgctttcatgggagggacaaattgcagagttgatcccttaccatttttacagaaatactcagaaagtgactacagcttgtcaactggcctgtttagtgagccgctgccttactgtaaaattgtctgaaaatcagattcgacttgacctccacttaatttcagtagcactctagcagttctcaaaacagtcacccctgcacccttgcgtttgcatcttccgct

SEQ ID NO: 101 - DNA, 2430 bp, Homo Sapiens
agttgcaactccaatgaaccgtgatcatgccactgcactccagcctaggtgacagagtgagatgctgtctctaaaacaaaaaacaaagtgaaactcttgattggcataattttgtttctctatcagctttatttttaaaaaaattacataagtaaaacatgtctctttagctattatctcttaaatcagattaccttctgtaataattctatgggaattattctacgggagcacagtcattcacgcttgtaaccccagcactttgggatgccaaggtgggaggactgcttgagcccaggactttgcaaccagcctgagcaacatagaccccgtctctacaataataataataataataaaaataaaaaaattaaccgggcatgatggtgtgtgcctgtagtccatgctacttgggaggctgaagtgggaagatcccttgagccaaggaggtagaggctgcaagtgagccatgatagcaccaccgcattcaagcctgggcaagagtgaggccctgtctcaataaaaacccgcaaaaaactttgggagcatcgtacggttgccagtgaataaggttataagataaaaaacaggatgctcaattaaattcagctaaacaagcgctgtatatttttagtgtaagtatatccaaaatattaatgaggtatacttacactaaaacaaatattcattgtttacctgaaatgcaaatttaaataggcatcctgtattttcatttgctaaacctggcaatcctaccagcactttaacatgaagccatgagggttgcctggattcatgctggtaggtaagcaccaatccattcggttgcctcagacaggacagaaaccattccctctaaaaaaatcgtttactttgacgataggtagcaacgaagcacggaagaatcttgaccctttgaggaacccgtaactgacgcaagtgccataaatgctactttgattgattctccgccccctccattcttctcttcctgcaattgctctatcacttcttccctctcaagtcccgccctttcagctacctccaactgctgaggaaccggttgcctaaaaggagccggcaaaagcgcctacgtggagtccagaggagcggaagtagtcagatttgactgagagccgtaaagcgcggctggctctcgttttccggataacgactacagctccgactgtcagtgccggccttcctcgtgtgaggggatctgccggacccctgcaaattcaatttctttcccattccgggcccttccctatcgtcgcccccttcaccttggatcatgttcaagaagtaaggacatgctgtggcctccatcggctgctcacaaaggcggtggggtgggggtggggaagagggcgagagctaagatcctctttctctctcccccgcccctgccatcctgactccctaaggttttctatagtactatgctctcactcccaacttgaacacttctttaagctttccatccgtagtccttaattgggtttcagtccctccactcccattgttttttctccttacccctctttctcttttgccccctcccccaattctgtctccattcctagggttctaccaatcacatccgtgcactgtgatttagaggcatattctctgtagctgagaggggagccctgcgctcactgccatatgtttattagttatgaactgaataaaggaaggcttgacttcctgggtcatgggagtgaaggagtctgggtgacaggaagcaagcggcctgtcatgcctattgcctagctgccagattaaccttgccttgaaaataacgattgccccataggctattcagtgtaaggaagacaaaaattccttgggaacctactagtgggtttgccttccagatttggtagacgcaaaaagcaaagggggaacatgggcaaaggaaggtgggttttgtgcatgaaattttgagcaaaaacgaatagggatcttagaaatcattattatcatcacttaaaaaaaatctcagcagattacatagcctagcaggggccgattttctatgttatgcttgggttggtcttttgtatctcaagaattgagggttttgttttctgatctcaggttttattattggtgggagcctgtgtttcttcctgggtagaattgaataagattttccaggaaaggcatttgtgtagctaattacagattatggtgcaaagtatgtctcatattcctccccctaaccccagctaattgctgtatacttgacagtttatttcaatattgtattaagacattggttttgtgctggacagagtaaaagggagatggtatttttttttaaaagaacaatttatttcataattaagtatctaaatacttggttgggaataaatgactaattagaacagtacctttaggtattctgatacctctacttagaaa

SEQ ID NO: 102 - DNA, 2500 bp, Homo Sapiens
tcaaaacaagcagggctctctccctggggcatctcacttttttttttccttttaaaccacaaggccctaacagaggagcaaactccatgtggtttcttaactgtttcaaaagtgatcaatcaccaaatcgaatgtgacgtgcattgtcaccttccaaggaaaactctgagtagtcttgaaagatagaatcacaaaagggaaaaatcacctctccagggctagttcccttataaaataaatctgtcctggggcttccccttggaaaaacacacacagggccccaagtgtgtgtaggctgactggctacacaatcatttgaatttagtttcgaaaatagcccttccctgtgtccctaatgtaaaggaataattaaaacccaaagcgcatttcccttaattagccgaaagccctagcaatgcatggcattgtgggcattcaggagccaaaatgcccccactcataaaaaatgatccaaacaatggctcgtgcccaagctttcacacttgttttgcagagaagtcttggctggcagaggcaggatttgtaattccttgggtcgcttgacttcacgaggggcgaggtatgcattgtagcgacacggactacttgtgaagcctttgggcgggagtcgcttaaagattaactttctcgggtttccgttaccaaaagcgtttccgtgaatagcgtgattggaaacttgtgcgggccggagaccgcggcgcggctgctctttcaacaggcgatttgttctcctgtccgaggctcatttccatgcaaagagcctgacatcagagcaccttttgttgctaaacgctttctttagcctcgagggagagagtcatgtggagctggaagagctcattttgaagagaggggtcccggggagctccctccaagatctagaggctccgcggccacccctgccgggtcctgccaagacttgctagaaggaacgagtcgcgtgccttagttagttggttcccgtcacaggaagaaacgcctttgcagtgggtttaattgcttctgggccgagcgaattccccgccgtacaactcagtggtgcggactttgcctcctgctaccctgttgctgcgccgagcggggtgggaaagtttctggagttgtcagtcgcgcagcccgtggccacctagacccgaggtgcgggcgcctgcgaagggcccccgcggggtggccggggccgccggggcatgcagcgcgggggcgcggctcggtgacgccgcgggcggggacccggcatccgggcaggctgcgcgcgggtgcggggcgagggcgccgcggggactgggacgcacggcccgcgcgcgggacacggccatggaggacgcgggagcagctggcccggggccggagcctgagcccgagcccgagccggagcccgagcccgcgccggagccggaaccggagcccaagccgggtgctggcacatccgaggcgttctcccgactctggaccgacgtgatgggtatcctggtaagttacctggggagggggcggcgcaggaagtacagttcgcagcagcccctctgaaaccgggggctcccttctcgcccacccactgggcaacccactccgcagaggcgtccttctctggctctagttcttagggggctaaatacacacagtataggatttcaaaccctaattaaaaaataaccagccacaggtcccgtcaaaaggtgttttttaaacaatcgggtatgatattcaacagtttaatctgggacacctgctgacatgttggtgtggaaaaggcgagaaagaggccttcaaaaagtagatgtaaataaatatttggttggtgctggattagggaaaaggctgatgttactgatgtttatctcttcaccatttgttgtgtgaccacaagagggaaaacaaacatttccttactcagaactgccaaaatgtttgcctacttttttttgcagtttttcaatttgtggagttacaggatatttgttttatatgtttggggctaaaacaataggacttattttgctaaatctgtgctgtcatgtattttgaaatgtccagtgactaaaagcgcccctggatttggcatagtctctgggaagcagttcttctgtatggagggtgaagttttaacctgctcagggttgaataccttggggaagtaatagatttgctttggtggagctgtagttaggcaggtagactggaatcagatgggcgaggtttattacagtcagacatcttaatccatacataaaagacaactttagtttaaagacttggaatggccagatgtgcagattatcagaaaagtctctagatttgctttgagatcttatattttttgagtgggaggagatggagtgaaagttcttctttgggaatgataaaccgtgtacagtttttagcacagtgattaaactcttgggcttcaaagtaagttatactaggtcaaatgccagctctccaattgactgtttacatgatcttggccaagtcattcaac

SEQ ID NO: 103 - DNA, 2487 bp, Homo Sapiens
tgtgcctgctctctccagagaaactggaggggtagcagttagcattcccccgctggttccaccaagcacagtcaaggtctctaggacatggccacccctcacctgtggaagcggtcctgctggggtgggtgggtgttagttggttctggtttgggtcagagacacccagtggcccaggtgggcgtggggccagggcgcagacgagaaggggcacgagggctccgctccgaggacccagcggcaagcaccggtcccgggcgcgccccagcccacccactcgcgtgcccacggcggcattattccctataaggatctgaacgatccgggggcggccccgccccgttaccccttgcccccggccccgccccctttttggagggccgatgaggtaatgcggctctgccattggtctgagggggcgggccccaacagcccgaggcggggtccccgggggcccagcgctatatcactcggccgcccaggcagcggcgcagagcgggcagcaggcaggcggcgggcgctcagacggcttctcctcctcctcttgctcctccagctcctgctccttcgccgggaggccgcccgccgagtcctgcgccagcgccgaggcagcctcgctgcgccccatcccgtcccgccgggcactcggagggcagcgcgccggaggccaaggttgccccgcacggcccggcgggcgagcgagctcgggctgcagcagccccgccggcggcgcgcacggcaactttggagaggcgagcagcagccccggcagcggcggcagcagcggcaatgaccccttggctcgggctcatcgtgctcctgggcagctggagcctgggggactggggcgccgaggcgtgcacatgctcgcccagccacccccaggacgccttctgcaactccgacatcggtaagcgctcctggtgccccgcccgagccccacgctgcagccaggactgcagcgctgcttagggaggcagggcgagccccactcctttcctctgccccaggagaggggcagacggggttggggcggagtggagaaactcgatgtccttgggcgggggcgctggcatagctgagaggggaagatgccctgcagaggaaactcacagtggctgagggagcccctggccgcctttgctttcctaacttaggtcgtgaggttcctaccggtccttttgacatctggaaaatgtccccattcactactaacggaggaagggctagaagagaagggtggggaaagggttcccaaaacttggaatgctaactaaagtgctgggaaattgaatagttaaaaaaaaaaaaaaaagttgcccgccatgtgcacggaaagttgcaggagaaacttggagtactccgagtctgcatcatctcctgcgcctatgaaattcattcttttcactgagacccaacccagctgcaggcttcccaggcaagcgctaaccgagcttctgggactgccaagtttgggtggatttaagggggaaaatgaggagaaagctgtggcattgacccacgccctggaggcactgtgtttgagagtgttgatagccagcagaaggtgcgaggggtcactcaccacatagctgtgaaaattcacaggaaggctatttttttcccccttgaatgtgtgtggggagggggagaatgggtagtggaaaacagatttgtcaccaaaagaacaaacctgccaagggtcacatcacggtgacagttccagactggacttagtgtcttgagtagagagaccctgtaaagagacctcctactccttagtgtgtatggagggccccgagagcatcctgggaggcttgtctgggagtgtttgggacacttgtgtttggatggctaaaggtggagtggcatctgggaaacatctctctcctcctttccagcccataaagcgtgcaagtccagtggctctgctgggagagtgtgtgtgtgtgcactgggctgggctgggcggtggggtgggacagccttgccgccctctgcctgtgtcgattcagaggtgaagaatggagcgtgtgtgttttaagtacagtcataaaggagaaggaaattttccactgagtcttgggtgagggactctaccagcgtgttgtggtgaggagggggaggaggtaggagcttggcaggggaggcagtgagggccgggaggggcactgctggtgggctgggctgagcctagaggtcagagtgggggtgtggtgaccagaatgtcagtgcagttggcagctgagggtgtttgtgtgacctgaggtcacccttgtaagaggctccctggggcctgcatggtacatcctcccctctcctgggggaacccagctggcccaggatttgtggattgcttagaaagatccttttgggcagcctgaagactggggagggttttcctccctcctccacctccacccacattccacttaccctttccctcctcatcccagttggtaacattcccacctgattagtgtgggg

SEQ ID NO: 104 - DNA, 5000 bp, Homo Sapiens
tgcctagaaggcaacatgcgttttcccgcgtgctaggtggagtgcattttaacaagacattagggttttaacacatggctggagtggcgaccaaaagggaaaactcagtttccagtccaagcctcctagagacattcctgccaacctccgcaccctctcacgccccaccccacgtgtgagagtctgcaaaaccaccggggattggattcgatggcgagcttcacgctcgggaacagtcagtaatcggaaggggaagtggacaggggaacttcaagaggcgagcctgccacgcgggaagcgcccgaacttgcgggtctccatgaatgcagagggcgccgggaagggggggcatccggccgcgaccctctctgcccctcccattcgctgcccccctccccgctggaatttctctgtaaagcaagacggagtagggggagggggagagggaaggggcgagagggccctcggctcactcccgagacgtgaggactcgccacccaggcattctcctcggggtgggctgggccccgggacgaccacccgcttcttcctcgcccccgctgcccccacttcgggagacccagagctctggatgcctttccccggagaagggggggtgtgcggagtcggggtggaagagaccttgctcgcagagctatatcaagtgatgtccagaggctgggagccccggcggcctctgtcccttgcctgtcgggttagatttatactttaaaaatacctcccgccctccctccttctctcgcctctccccgctgcaactttctttgatccgctcaaaggtggcttaggtgaaattggagtaattcccttatgggggtcttaaaatgtaagtgaatgtccttatccggggtgactcaaaagcttaagtcgggaagcccaacgtgactaaaaccaataggtgattgttcggggccgactgtgtgcgggtgtacacggtattcggcccgggtgtcatccgcggcgctggactgtttcattttgagtttgcaacttgggtttttcagcgagctttttttcttcctgaaagctaatggcttccacagcaattagacattttcctcgcccgccccttccctcccctttctttacatataggagatgggatactcattcccgctgctattgataaggtcggaggcggccgggcctctccccagctttcgcccgccccagcgcccgctctccctccgccctcccttggcttccttttgatgtagtggggaacgcgtcctactaaaaaaaaaaaaaaaaaaaaaaaaaaaaagtaatctgcccggtaacaatcagcgcgcagtagcaggagccccagagctattggctatgcaaatagagggaggggagacggcgccccaaactcttcctcacccttttaaagcgatatcccctcctttcccccccaccaccccttccgccccaccctcgtttaaagaggctggctccggggcctgagttaatcgcttgcacctctagtttattcgctcccctcctccgccttgcagggaacctagtgtacggctcacccagcccgcgccccaccccgccttgctggctctccgcgcccctgcccgggccccctctctcggtgagggaggcactcagtcggcctcggtgtgcccagagagctcgagccacgccatgcccgctgcacgtgccagcttggccagcacatcagggcgctggtctctccccttcctcctggagtgaaatacaccaaagggcgcggtgggggtggggggtgacgggaggaaggaggtgaagaaacgccaccagatcgtatctcctgtaaagacagccttgactcaagcatgcgttagagcacgtgtcagggccgaccgtgctggcggcgacttcaccgcagtcggctcccagggagaaagcctggcgagtgaggcgcgaaaccggaggggtcggcgaggatgcgggcgaaggaccgagcgtggaggcctcatgcctccggggaaaggaaggggtggtggtgtttgcgcagggggagcgagggggagccggacctaatccctcactcgccccctccccctcccgggccatttcctagaaagctgcatcggtgtggccacgctcagcgcagacacctcgggcggcttgtcagcagatgcaggggcgaggaagcgggtttttcctgcgtggccgctggccgcgggggaaccgctgggagccctgcccccggcctgcggcggccctagacgctgcaccgcgtcgccccacggcgcccgaagagcccccagaaacacgatggtttctgctcgaggatcacattctatccctccagagaagcaccccccttccttcctaatacccacctctccctccctcttcttcctctgcacacactctgcaggggggggcagaagggacgttgttctggtccctttaatcggggctttcgaaacagcttcgaagttatcaggaacacagacttcagggacatgacctttatctctgggtatgcgaggttgctattttctaaaatcaccccctcccttatttttcacttaagggacctatttctaaattgtctgaggtcaccccatcttcagataatctaccctacattcctggatcttaaatacaagggcaggaggattaggatccgttttgaagaagccaaagttggagggtcgtattttggcgtgctacacctacagaatgagtgaaattagagggcagaaataggagtcggtagttttttgtgggttgccctgtccggggcccctggcatgcagggctggatggagggagaggggtggggggtggcgggggaccgcgtttgaagttgggtcgggccagctgctgttctccttaataacgagaggggaaaaggagggagggagggagagattgaaaggaggaggggaggaccgggaggggaggaaaggggaggaggaaccagagcggggagcgcggggagagggaggagagctaactgcccagccagcttgcgtcaccgcttcagagcggagaagagcgagcaggggagagcgagaccagttttaaggggaggaccggtgcgagtgaggcagccccgaggctctgctcgcccaccacccaatcctcgcctcccttctgctccaccttctctctctgccctcacctctcccccgaaaaccccctatttagccaaaggaaggaggtcaggggaacgctctcccctccccttccaaaaaacaaaaacagaaaaacctttttccaggccggggaaagcaggagggagaggggccgccgggctggccatggagctgctgtgccacgaggtggacccggtccgcagggccgtgcgggaccgcaacctgctccgagacgaccgcgtcctgcagaacctgctcaccatcgaggagcgctaccttccgcagtgctcctacttcaagtgcgtgcagaaggacatccaaccctacatgcgcagaatggtggccacctggatgctggaggtaggtcggggggtggcgctcgccaggagccaggacccctccggatgctcgggtccccggccggagccctaaacctgggagagggcaatccccgcgccggcctcccggctcctgtgcgggagtttaccgcgcgccttctggcgagacgcgtggctttatttctgttcctctccagataaactggggaggcagaggggggaggaaaatctgggagaagcgaggctgtcctgggcgggggtaggggagcatcccgcgcgcgtgttcctgcatgtggctgcctcttcttcccacccccctcgcgacctgtcttttgcgaagccgccgcggctgcttgcgctgcggccaggaagagagtcggggcctgaaatcgggaccccgagtagaaaggcaaccccccccaaaaggccagagcaaattcgtcttggcctcaggtccccgcctgtggtcgcgactccgcgctggcacttcaccggggaggtggagggaggagggagaaggagagaaacggggaattcgggagccccggaagtcccattgaagaaacgcgtgtttcaggggaacccaaaagaaccgcttcttgcccctcactccaagtctttgcccagcgagccgtgtgcccacgtatgcacagctctggacctgccgtggtttcgccatgttgctttgcaaactccctttggaaaggctgggaaacgtcgcccgcttaccctcgcaccccattatcccggccaccccacttctaatcgtgccctctcccccaccccccacctcacgaagattacttacagtttggttttccagcttcctcggtgcggagatttgggtggggtaggaagggggggagggggtgtgtgtaggggggataccgggtcacccctgaaggagaggtgggagccccccgtgcctctttccagggctctctgctcccgtctttcccctcgctcgtcaccgcgttccctagtttctgtccttgtgggccgcagccggacactcccgccgcggcgctcaccccttcaagtttcctcccgggatccaaagccccaggggtcggaatacagacctttctggcacccgaaacctctgtttcgggaagcctggctcttctttggggttttcacgccaaaagggcttttctaggatatttcctcgatttttaattattttttgaaaccatccccccctgctccgactccagctgccgaggctgcggcgctcttcctcctctcctccctccccctctcttccccacctctcctcacccgcccccccaaaagcggcccctgggccgcagggacccccccagacattttttccaattgtcgggaatgatagaggaggatctggggatccggatgagaccaagaagtggacccccggagcctccagaatatttttattgattttttgaaaagatgacgaaatccaaaaaagagtgagtgagttagagtgcgcgaaggagtagccaaagggagcgtcgcggagctgccgcggctgctgcgcacttctccgactccccgttttggagctgtagttcac

SEQ ID NO: 105 - DNA, 5001 bp, Homo Sapiens
ttaggaagtttatctatgggaaatccatattcatggtgtcctgatgttgcagaggacatcctgagctggctggagtaacttgggacacaggtcaatcgactgtaatctaacttctgaggccattcagtaccctctacagtggccacctaaaaaaaaggcagccaggtgtggtggctcaagcctatatagatcccagaactttggaaggctgaggtgggaggatcacttgagccaaggagtttgaggccagcctgggcaacatgaagaaactctgtttctacaaaaaataaaaaaaattagccaggcatggtggtatgcacctgtagttccagcttcttgggaggctgaggtggaagaatgacatgagcccagcaagtcgctgcaatcagccgtgatcacgccgctgcactccagcctgggcgacaaaaagaaaaagaaaacggagcctgttcactgggtgtggtagacaaggtaaacttttctttacctcccatatcccacaaccttggatgtgctcacagtcatggtagtgttttgtaatgatgtagctgatgacaggtgtgatgttggagattcttctacctgactgctgctatcagtcctaccagcccccaacgtttggtgcttgttctaaagggcatgtcctaggagtcgctttaaactctcaaagtatcactctctatacaaacaagaagtgcaagtaagtagcctgagctcagcctcccaataggaatatttcattatcactagatcaagtctttccattacaatgactgatctgtctctgaatcctgtggattcatccttcaaaatgcccttttcttccagttctcatagctagtgccctaaaagtgacctgcagtacctcctgctgagacgaatgtaccagcttcctaactagcctgcactcccttcatccccccaagtcagtgccagaccaccttgcctgaaaaaccactttcagtgtgtctcacctcagcagaaatgtttctcagcttccaattaacaatcacatcaaacccctgctcttgtctgcgttttaagggtatctataggccgggcgccgtggctcctacctgtaatcccagcactttggaaggccgaggcgggcagatcacttgaggtcaggcgttcgagaccatcctgaccaacatagtgaaaccccgtctctaccaaaaatacaaaaaaaaaaaaaatagtggggcgtggaggtgcacgcctgtaattccagctactcgggaggctgaggcaggagaatcgcttgaacccgggaggcagaggttccagtgagccgacatcgcgacacagtactccagcctgagcgacagagcgaggctgtgtctcaaaaataaataaataataaattaaaaaaataagagtatctataacctggtcccagcctgaatttcctttttcaccccaacacgtagccctagttacattcttctgacgtctgtaaacaagcccagcccttcctgttgtgaagccaagttcaggtggttcctcttcgcctgactgttttcccattccacttaccggaagcctagtcatccttcggagggctgtacgggggttgcaagaagcaacggaaacggttcagcacctgctaccttccatcatattcttttcaataaaggggcaactcccgccaatggcagtgtagatttcctaacctctacacatggaagattcacaccattcaggattgttgtttaactgttgagagagcacttgatacttaacagcttactaggctacaagacagcgcaggaaagaatcctctgttgtccttttatgttatcctgaacagttggttcacagagttactgtaaacacacaaaacatgactgccagggcttagtagtgaggaaggtgggaactagtcctgactcagttaactgtgcccaggagaagctgcttaacctcaaaggatttcactattactagaatcaataataccaaccctaggggtaaaaataaagataaatgtgtgcaaatcctgcctgcagtctcgggcacgtcgtgggtgtccaagaactgttcttaggcagccggtggggacaaagtctgtgtgcctcctgtcctggaataggtcccaaggtcggcttacttgcaaagcaagggtacggcgcaagagtactgaatacgggttggaagggcgctggctctaccctcagctcataggccggctgggcggcgctgaccagcagctaggccccgtcttccctaggaacggccacgggggccctgggagggtatgaatgtctttttgcagtgaggcctctggaccccgcggccccccggcagcgcaaccaaaactcaggggcaggcgccgcagccgcctagtgcagccagatccccgccggcaccctcaggggcggagccggaggcagggccttcgggccgtaccaactccacgggggcaggggccgcctcccttcggccgcgcgccactcaagtacggcagacaggcagcgaggttgccgaggccgaggctagcctgcagcctcctttctcccgtgccctgggcgcggggtgtacggcaagcgcgggcgggcgggacaggcacgcagggcacccccggggttgggcgcggcgggcgcggggcggggcccgcggggggggggggcggggcggcggtgcccttgcggcgcagctggggtcgcggccctgctccccgcgctttcttaaggcccgcgggcggcgcaggagcggcactcgtggctgtggtggcttcggcagcggcttcagcagatcggcggcatcagcggtagcaccagcactagcagcatgttgagccgggcagtgtgcgggtgagaagaaaggggacccggtcacggccccaagggcgaaggggctcgcggcgggcagggcctccgcggcaatggcgacagtggccgcaccgggcctggcgggaccggggcacctgcaggcggttctcccgggagtgcccggcgcggcggctggagcggggatccgcagggaggggacgcggggactcgggggacgccgcgcgctgccgttcctcggcagcccagcctgcgtagacggtcccgcggcgctgactgaccgggctgtgctttctcgtcttcagcaccagcaggcagctggctccggttttggggtatctgggctccaggcagaagcacagcctccccgacctgccctacgactacggcgccctggaacctcacatcaacgcgcagatcatgcagctgcaccacagcaagcaccacgcggcctacgtgaacaacctgaacgtcaccgaggagaagtaccaggaggcgttggccaagggtaggttccaggctgagcggcgggaggcagtccccggcagaggcgaccccagggagccaggccccatacggacgggcctctccgtggaggagaactcgcttcgtatttgtaccggttccgagttttccaggcacgatagtctctcttttaaacacatggtctacctcattgtagaaggagtgcctcgatgggtttgaacacacttctgtcatctcagggaacttggggtcctgcgaaggagcttgccttactgttgtgagccacattccgttacacatattgccagcactggtgaattgtagggcctgaaaagaaagctctactgtgtcactcgttttttttgcaaattgaaattgttcttgttgtataatgtgctttggggaaatgtttggtctctcaggtaggtgtgccagccgtttgcaggagggctgagagcgcctgtccactggtggccagacatcatcgggtccgcaggtgtctctgagtgtcagggtcacctcctgatagaagtgggagtggtgtcttactgccaggtcacactgaaggtgggagacaggaggacactactccgtgctaggaaccatggtccttgtcatcttcctgagagcaaacggggtcgggactccagcctaggacttggagactccctgcatccccagctaccctgcaggtgaaacttcactgagcccacttgacttcaggtgggagaggaggaggcacaccgttgtggtgtgcgttaccaaaaaagcagtaacctaactgtggaacagttcaggatctttagacttgatacttttcttgatttcccttaggggtcaaagttcacaaggaaaatagccctttagtgggaaactgaaacaggcttgtttttatttactatttactcatatttgtaatgcaattaaaatatatgttgttaactttttttttttttctcaagagctcggttgataaaaccaggggtatgtggactttttgagtctgtgccttttgggggtgtgtatgggaatgttatgttttaacgttttttacaaaatagtattgtctttttaatttattcgttagtggtttgcacaaggaagataatcgatagtcatgttttttagactctctgtattgcttggtaagctacgtagtaaaaaatgtttacttttccttaaatgttttgaatttcggggttatgaaatttgttgagtaatttttagacagtcacatcttgttgactggaggcatctagtggaaaaatgcagtatttcagcctgattgtgtttgaagtaaatgattaaaagaggaggaagttaccacattctggaagatttacttgagacagacgaaccttgaattacgggaaaaggccccgtgatttaggaaataacaaatttgggaaacatgtaatggggagagactggggaataccccagttgtgaaagtacttcctgtaaggcaacatctgacaccaggaacctttctcttcagtattttaaaaacaacttaatttcagtcctttacttgtggaatcagagccttacttatgtaatacaacccactggaaaaaagctttttattgtattgtactatattgtttataagtgattgagtacctgcagagctttcttttacttaaacatattttaaaaattattaaaaagattttcatgtttgaaaacttggggaaaaaagataaaacaatgtcataatctcatc

SEQ ID NO: 106 - DNA, 2001 bp, Homo Sapiens
ggtcggaccagcggaggccccaagaagagccagagcgccctgtattcccgacacgcgccacaagtggtttaggagcggagggaggagcgctgcggcacgggtcgggccggtcgggccgggcaaagaaggccgagacgtgctcctggaagactcgccctccggtcccggtgtcactcgttccccattctttcctcttctccaactagagtaatgacgcccaaacccgcacctatgcgcgcaggcaatcgggtgggtggacgcgcggccaccaaacccacagcaccgtcaccaaccctgggagggcacggccgggattaggaggagggggagcgcccacacctggggaggcaggtgcggaggcggccggcccggggacctcgagtgcgtaggactcggggtcggggtcggggtcggcaagccgggcgctgtgagcgcgtcggagcgctggcccggagcctggcagggggcgtctgtaccggctgggcagcccggggcggtggcgatggctggcggcggcggcggggtgtgcgccaggaggccatttcctcgctgcgcccctggcggagccgggtttgcctgctcttggccgccgccgccaccgccgcgcaagtcggacagccgtgagggctggaggggaaaccaggtcaccggttcgcagacgcggcgcggagcaggcgccccgggcccggagtaagacagcgcccgggaagcgggccggggcgggccgggcacgcgggggacccggagaggcggggactctggtgccccagccgcagtagcttcctacgcctataaaagtggagagaccggggaggtgcggcgcggccctggctgcggccgcctctcttcgcccaaggagttgacattttgcaggactcgcgcgacgcccagtcgccggcgctccccgggaccccgccgccgggaggagggggcggaggagggtggagactgcggggcttggccaaggaaggcgcacatcctcgggcgggcggccgtgacgcggcggggattaactttgcatgaataatgtgagtgcgcttggaaaagagacctcctgctccgcgggctcggggcaagagcccgcaggctaccttccccgggcaggggcgctcaacccaaccggctccagggcactggtaatttggctagaggaccgcgcggaggcagcggggtgagaggaggagggggcgacagttccaactgtccacagggtgggcgggatggtgacggagcgtcgcaagaacccggaggggtgcgggcggctaagccgagcgcgcgcgggcgggcaggcgggtgagcgtgggtggtgggggtgtcatcagcctgattacctgcctccgcggggcttctgcgccccggatctgggaggaggtgccctctcgtgttcgggcaccgcgcggcggcaggctgggagctacggagtggacagtggtggaacagggtggccgggctctgttccaatcgcagcggctctgttcctcaaaccccaagcccagctgttgacatgttccttgtgaaatggagtttggcatcctcagcgccgaacccagtggaagtttccatgatgaggaagttgtgtgacatgggggttcggaaaaggttggcaggccaggggggagggttaaagggactgtgggtctcccatcccccctttttcgcctgccccggaactcccgggcttggaaaggagaattatcctggatgttggcgtgcgccgtggccggtgcctggcgactgggcttctctccgcctcctgggggcttggcggggatttcgctagcctcctgggtcgcgctccttcgctttgcttctcttggcgcagcatcttcctctgggtctcctcgagttggttgtgataccaattgtgccaactgtgtgacctccaccccctcggagaaggactcatttgggggaattttcattcttagtggattttgcccttcttagcggcagttgtcactttgggggaggatttcccaatgaccattgtgggattattat

SEQ ID NO: 107 - DNA, 1100 bp, Homo Sapiens
agactgcatctcaataaataaataaacaaataaataaataaaggccgagcacggtggctcatgcctgtaatccctgcactttggtaggccgaggcagatggaacacttgaggtcaggagttcgataccagcctggccagcatagtgaaaacccgtctctactaaaaatacaaaaattagggccaggcgcggtggctcatgcctgtaatctcagcactttgggaggctgaggcgggcggatcacgaggtcaagagtttgagaccaacctggccaacatggtgaaaccccgtctctcctaaaaatacaaaaagtagccgggtgtggtggtgggcacctgtaatcccagctgctcgggaggctggggcaggagattcgcttgaacccgggaggcggaggttgcagtgagccgagatcgcaccactgcactccaccctgggcgacctggcaaggctccgtctcaaaaaaaaaaaaaaaaaaagaaaaagaaaataccgggcgtggtggcagacgcctgtagtcccagctacgcgggaagctgagtcacgagaatcgcttgaacccggatggcggagtttgcaatgaaccgacatcgtgcaactgcgctccggcctgggcgccaaagcgatactcggtctcaaaaagaaaaaaaagaaaacaggagaataatgaaattttacttatttattttatttattttttatttttttgagaccgagtctcgctctgtcacccaggctggagtgccctggcgcaatctcggctcactgcaacctctgcctcccgggttcaagcgattctcctgcctcagcctcccgagtagctgggactacaggcgcctgcaaccacgcccggctcatttttgtatgtttagtagagacggggtttcactatgttgcccgggctggtctcgaattcctgagctcaagtgatcctcccgccgctgctttccagcgtgctgggattacaggcgtgagccaccgcgctcggccaaaagttttaaatttcagtaagttccaatttatcaactttttccctgtatagattggtcttttggtgtcgtctaaaaactatttgcctggccctaggtcctgaggattttt

SEQ ID NO: 108 - DNA, 2250 bp, Homo Sapiens
ccagggtgtccacatagaaggtgctcagaaaaataccttgaattggcctagcttggtaagaacatgggctttggcagcaggaagttcaaatacctgctctactctttattattagtaatgtgatcttggacaacccacatagccttgctgagacctgttttatttgtaaaacatctcttggagttgctgtgaggataaaatgacaacatatataaagagccaggcttcttctagaagaatgtccttgggtagcatgtacatttccatccttccttttagagagtgggggtaataggataccccctcctccaggggtatcccctctttctagggacctacccaagctaggcctttcttccagtgaaacgtgcatcccgagggcttctaggatgaagtagtccactggaaggcaccagctcttccttttatctctccagagctggacagtgcaccaggggccggtactggttccccagctaggagacaccttgggcggggctttgctcgccggaagcacgcagagcgtggggaggagggccccctctgcctgtgtttgtgccaacagcacccgcgctgccgcgtcgggttccggcggccggagtcacacatgatgtcacagacaatgacacaagccggtgtctcattccgacacagcgtccgagctgcacaatgtcacacccgggtgccaaacacttggccccgcgcgacccggccctacgcctcctgccgccgctctccgcgtctccgggggaggtggcccggttcggccgggcagggggctggcgggcgagccccgcgggcgggctggcgagcgggtgatgtcacgggcagcggtgggtgggtcactcggaggtgaggcgccgccaggcgagttcagcgagagttcagccgcattgcattaggcaaatgaggcccggcctgggtgggggtgtgtgttaaggggaggacaccgggaccacccccctcttccccgccccaccacctcctccaccacggcttcgctcggccagggactgaccaaaccttgggggagcctgggagccggaactggtacaagggaggacgcccgcccctcttccgtccttgtcccctcgcagccccctcctctccctgtactcggcgtccctctgtactctgtgtactcctcatctggagcctttcccccttcctgcttctctcctctcctcccccttcccaggctgcccccacttgcctgtccacatgccgcctctccctctcggttccctgcgtttctcccgctgcagccggacgcgccgggaatgggttaagccaggggcggtgcctggacggggcggggcggtggaaagggggtggtgcccggaggggagggggcgcgcagagctggggtgggggggccgtggcgcgtaccaccagagaccgagcgagtcgccagctgcccctggcctggcgggggcggaaccgcgcgggatccccacccccacccggaatcctcgccacggagaatccctggagaagccccggatccccggctgggaggaggaagtgctcgttgacccccagccccgcgctgatcccgcccccggcctgcggacttggggagccgctgtactctgcctcggacgccacgagactctagacgggagtcccctcgaggtgaagccgctgagttcccgggccccgccaggcttccctgggagagccgacggaccccccctcccagcacacacaacttccctgcttttcaccgggactggcggagcggccggcggacttagacgcggggacttcagggcagggggcgccccctgcccgggtcaccagtcggggcgaggggacgtctcctctcccccagctgctctgctcggatggcgccgccggctgagtgacgggggcggcgcgcaggacttcccagctcggacctcttgccttcgaggggaaagatgtacgagagtgtagaagtggggggtcccacccctaatcccttcctagtggtggatttttataaccagaaccgggcctgtttgctcccagagaaggggctccccgccccgggtccgtactccaccccgctccggactccgctttggaatggctcaaaccactgtacgtaccggcctctcagtctgctgttgtagggggtgggagtgggcggtagggcttccactactactcgggggtgagagtcccggggtgtagtggaggtcctgtctctacctttcacttaacccgtgttgcccttgctggacaattgaaccctcccggccgcac

SEQ ID NO: 109 - DNA, 2001 bp, Homo Sapiens
aggtagataagggctgaagtgaggcagccattcgggaatctactgcagaaggaggcagcagaagagatggagcagagtaaatgagacttgggaaatatttaggaggaagaatcaattaagatttgaggatcaggtgttgcgaggtgagggagaaggcaatgtcaactatgaatcctaggtatctgtcatgtgccatttctagaaaaagagcaggtttgaggagaaagatgtttggttctgaacatagtttgtagagctcactgcacatacaagtggagaggcaagtgggagttgtaggtgtgaagcccagaggagaggtgtggacgggataagcatttaagactcctccatctagaaggaaactgaagctgtgggtgaggtcatcacagcacagcgtttaggagaagcccaggtaaagaagctgacgaatgtctggaccctgacaaccttaacatataatggtttgatagtggaggtggaggcaatgtagaaagaatgccagaggcaggaaaaagcaagaaggatgtgttatcatcatgaccaaggaagaaacgtgtttcaagaacaaaggcgtcaactctgccccatgcttccgagctgtcaagtaaagtgagaaaaacagaaaagcgttccctgggtttagcaacacggaggtcagttgctaaagggagcttctagaatgacgacgtcgccaaatctgtcctctgcctggattctcggcgatgaaactactacagagacctccaagtttgggcttctgcaaacacagcacgtccttctgatcgttctctaagatatgtaaacagaacgccagttcccagcgtggcaacacgggactgggctgcagctcacccagccggcggcccccgccggaagccggcggaaataccccagcgcgtgggcggagcagcggcccgcagagggaggcggtggcgcccacggaacagccgcgtctaattggctgagcgcggagccgcccggtgattggtgggggcggaagggggccgggcgccagcgctgccttttctcctgccgggtagtttcgctttcctgcgcagagtctgcggaggggctcggctgcaccggggggatcgcgcctggcagaccccagaccgagcagaggcgacccagcgcgctcgggagaggctgcaccgccgcgcccccgcctagcccttccggatcctgcgcgcagagtgagtggccgtgaggttccgggtgccgggggtgggacgcgcagggacagagtcctcgggccgtgcagttggacgccgggcgaggacgggccgtctgtgctgacccgcgaatagtgatcccagaggaagaacgcgtcctgagtattccaagtgcgagcagtgccacctgttctcggagatggcactgctcagcacgattgtccttgccagtcgtgctctggcagtgaagaggacttgtgaaatataattttcctctagaaggcactgcaccttcccatttaccgtcactttctcccgtttccacccctttccatcagtcacgttttcttcttttcgcagaaagtttcatttgctgtatgccatcctcgagagctgtctaggttaacgttcgcactctgtgtatataacctcgacagtcttggcacctaacgtgctgtgcgtagctgctcctttggttgaatccccaggcccttgttggggcacaaggtggcaggtcagtaaatgttcatggaatcagatgaatgagtacatgacttcggaatcttaattatgtttctatgttcaaagatggaagggcttaatgtcttcctagagtttaaaagtgatgtttagtttttgcagaccccccaccccaaaataatatagtcttaaaaaaatttctggccggtactgaagagttctgtggtaggtatgcagaggtgtggttgattgtgctttgaatgttgtttgtatagataaggagttattttcatagaacagaaacaggacttgagcctccagcacagtccattgtgcaaccattgcttaa

SEQ ID NO: 110 - DNA, 2001 bp, Homo Sapiens
acatggaaggccgactccctaaaatcagtgcaagaaaaatgataacaagttatatctggagggacctcggggattatctacccgctggatttaaagttgaggaagccgcgggcagcaaacaaggtctcacagttgctggtggcagagtagagaccacagaccaaattgcctgagtctaaactcaatgttctttccccttagactgccacccgcacacacacgcacacatgcacacctttttggaggcactgcacagcaagcacagaagtacgccactgagtcctgtgtccctaaagtatttgactgtccctccgctgggggaaagggcaggcagaaaacaagactccgtgtgctgtcgctgtgccgccccctgcctctctgacccgcgcccgcagagaaagtctcaagagccgccccaggctttctcccacgttctccctttctctgctgcagttgagtttccagagcgtgagcgcgcaggatgacacctggctggctgagagctgccggggaggcgctggcgggtgccgagagcgcactgaccctgacgcggggtgcagcacggctgggaagcccccgggcctttggctaagcgcgccgggggacggcacaggggggcgacgcgcatccaccacctggtccgcgctctcccggcctccggcagctcagggcgggctcggttggggaccctaatggctgggtgccggccctgggagaagggcacgcggagggcggagggttgcgcctcggccccggctcggccccaacgccctctccctggcgcgcaggtttagaaacagggcggcctctccggccgccgcctcggcggctcgggtccccatatatagtcatatccaccgtcaactgggaggccggcggccggcagcgaatgggcgagcggcccccgcgggaggagcggggagggggcacggggcggagggaggagaggaggaaggggggcaggagaaaaaagcttttccaaaaaagtattggctgtcttgaggaatgcggtcgcccccttgggaaagtacatatctgggagaagcaggcggctccgcgctcgcactcccgctcctccgcccgaccgcgcgctcgccccgccgctcctgctgcagccccagggcccctcgccgccgccaccatggacgccatcaagaagaagatgcagatgctgaagctcgacaaggagaacgccttggatcgagctgagcaggcggaggccgacaagaaggcggcggaagacaggagcaagcaggtctgcgcctccccggccctgcgcccgcgcccagagcgccgggactcgagcctggcacccccggctggatccccaccccgaggactcggggagccaccaccctacccccaccaccacccagggcggccagggcgcgcgtctggaaagaaggaagggaaacgcaagagccaggcttagtctaacttagtctggtctgaggacgcttatttcccttctctggttcccatggcccgcgaaatcaagtcctagaggcgctttattctcaggactgggaatcagtttgggggagggaggaggacacccggttcctggggacgtttgaaggaagggcgagggatggagaaagggggtcgagtaactcaagtgttagaagttcgttgacttttgactggggagaaaggaaccttaaacttggggaggagaagggagtcctggagttgttacctaagaacaaagatggggcggaatggaggctacagcccgaaagccaggccagcagtggcgttcttctgtgtccccaagtagtggacttgagcccgctgagacctcggcaggagtctcgtcccagggcaggtgggtgtgcggggtgagccgcggagcggttccagctcgggtaaagaggaagttacctcgggtcctttgcactccaactcggcggcgccccgagcccgaggggccccagccaacccgacgcccgtgtgttgtgtgtgtctaacacccggtccgtgccggccgcccgcgcccgc

SEQ ID NO: 111 - DNA, 2002 bp, Homo Sapiens
tcctcaccccgaaaggagtcacctccttgcagttccccagttgcgaaaagaggaggaagttggctgggccgggggccgcggggggcaccctccgcagatggcgggacccccctgccggccatggcaaaaacgaggcttgtctctcccaccgcccccaaccttagtccttggcacattgttgaaagtaattgaataaaatcggaaattcgagaaggcgttcgttcggattggtgagattttgaggggagaaagaagcggggacttcgccggcaccagcggcgccccctcctcggccaccgttaacccccattccagagggcactgccccgccacccagcctaggtccccctgcgagagcctcgcgggcccgcgcagcctccgcgactcgaacagatcttcagtccttggaggaatgcctgtttctctaacaataaaaaattaaagaagcgctcataaatgccaagtcctctcgcactatgcggagtacagaggacaacgaccacagccatccctgaaccccgcccacggcacagcgccggagccggggtctggggcgccgcttcctggggggtcccgactctcagccgcccccgcttcacccgggccgccaaggggctgggggaggcggcgctcggggtaaccgggggagactcagggcgctgggggcacttggggaactcatgggggctcaaaggaactaggagatcgggacctcgaaggggacttggggggttcggggctttcgggggcggtcgggggttcgcggacccgggaagctctgaggacccagaggccgggcgcgctccgcccgcggcgccgccccctccgtaactttcccagtctccgagggaagaggcggggtgtggggtgcggttaaaaggcgccacggcgggagacaggtgttgcggccccgcagcgcccgcgcgctcctctccccgactcggagcccctcggcggcgcccggcccaggacccgcctaggagcgcaggagccccagcgcagagaccccaacgccgagacccccgccccggccccgccgcgcttcctcccgacgcaggtgagcccgccggccccggactgcccggccaggaacctggcggcggggagggaccgcgagacccagagcggttgcccggccgcgtgggtctcggggaaccggggggctggaccaacacacgtccttgggccggggggcgggggccgccttctggagcgggcgtttctgcggccgagctccggagctggaatggggcggccggggaagtggacgcgatggcaccgcccggggtgcgagtggggccgggcgcgcgcgggaggggaaaaaggcgcgggcgagccgccagcgcgaggtttgtggtgtcgccgatgtcccttcggggtactctagcgcagccgcctggctacttgacccactgccaccaaacgttttaaattcaccgaaagcttagcttcgaagcaaagctccgtttcgccggtgaagcaggaagccttcgctgcaggaactgacctttacctcttggagcggcttctgcagaaaaatccccgggcagagatttgggcggagtttgcctagaactaacgcggagccagccgatcccggcctaccccggggccaagatttcagtggcttccctttttcctaaacacttcacgagggtctgtttccgggctgtgctccccgcctagaaggaaaatttttaggacccttgttcgcgaagaggtggtgtgcggctgagacccgcgtcctcaggacggttccatcagtgcctcgatcctgccccactggaggaggaaggcagcccgaacagcgctcacctaactaacagctgctgagagctgggttccgtggccatgcacctgggactgccttgagaagcgtggtacggccgtgtccccatgtgaccttagagtccctttcgaaactgctgtgcacagtcggtcacaatttcagacactggtgagaagggtggaggaaccctctggggacagccaggcaaggtcg

SEQ ID NO: 112 - DNA, 2001 bp, Homo Sapiens
gaacccggctcttgtttcttctacctttgccatcaggtgtctgccgcggagctgcggcttatctgggagacgagcggggttgacacgcgcgcacacactactgccattcagctgccgcctggctctgcctggagtagtggatcccacccgcccacctgccaccgagccattctccagtacgccccagcaggacgctgacacctccaaccttggcctttgcctttccactccttccggtctgcctggtttttaagtccgcccccagtcagtccccactcagtcttcgcagcagctctcatcctccacttggcctcttggagttcctcgccggagtgctgactagtggatatttctgcccggctgcggcggcccgactgcccttttgtcttttctgcgtgacctcggggcaggtcctggtgcagagcgtcgccaaggacgccgagcgggaggcgggattgcccagacatccttcagcgaagtgcatgtgtgtttgtaaaccatcgttggctgtcgggagaccgcgaggaccggtccaggctgcggcggagtcgagggcgagggagaggccgcgtgagtgagcagagtccagagccgtgcgcccccagaactgcgcgtccgccccgtgcacccccgcgcgccatgcccagttgccccgcgcgctctgctacgggcccgctgggcttccgcgccttctagcttccggagcccactttgatcggggccataatacctattgagatcccctcttctgtcttgtaccttcgccactggcatcggatttgcagaagcgtgcgtgggatcagaggaccgccctccccacaacaaccggcccctgcatcttagcagccgttggaagccccagctcttttaccgccaagttcatccttgggagacagaagacgcgtgatctcctctccgctgctcttggggtctccttgcagccctggccaggcggattcatcctcaggacctaaagttgcccaaggagctcctgctctgccagaggagggtggagagggcggtgggaggcgtgtgcctgagtgggctctactgccttgttccatattatttggtgcacattttccctggcactctgggttgctagccccgccgggcactgggcctcagacactgcgcggttccctcggagcagcaagctaaagaaagcccccagtgccggcgaggaaggaggcggcggggaaagatgcgcggcgttggctggcagatgctgtccctgtcgctggggttagtgctggcgatcctgaacaaggtggcaccgcaggcgtgcccggcgcagtgctcttgctcgggcagcacagtggactgtcacgggctggcgctgcgcagcgtgcccaggaatatcccccgcaacaccgagagactgtgagtatgcgctcttcgtcttcccctctccccatccgggccgcgcacccctgcctccactggaggaacctgtcagctcagggtcctgtgcctggggcagccctcgctagctctcccccatgcacatcctggggttgagctctccgggagggcactggccagggaagggcctctgtccaaggaggggcgggtccgctggcagctgcgctagttctccctcccctgctctcgtcccgccactcgcagctccttgctggctagttctctggggctggggagcgggtagataggggacaagtactggaggatgcccggggcaagtgagacgccactttgttctccagagtccataaacggagtcaccttgcgattgccagcatccaggtcggtttcagagcccagtcctcgctcttgtcgcaggctggcgcggaggggatagcagggagactcaaaagagagaaacttgccttccccgattttttgtcaccctcctgggggcgaaggttaggaagaaggggtcatggagtgcctgggggtgcttctcacaggtcgcggggagaagggtgccccaggacggcgacacctcgcatagtagcctcgcgcagccccccgcccccc

SEQ ID NO: 113 - DNA, 2001 bp, Homo Sapiens
ggaatctcactcacgctcggctcctccacccatcccgtctacagcgcgtgtcccagtccagggcgtgcgtgcgctcggtgtccgattccgggctgtgtgtgtccatttggcgagatgtcgagagcggggggagtgtccttgtcggtgtatctgggcccaggttaggggacttctcctccccacccccgcgtgggtgtgggggtgtgtccgggctagggcgcgtgtgcttctgtgcctgtgcgtgcgtgtgcgggtcagggtggtgggaccgcgcatcagggcagggtgcctgcgtctgcgtctgggtctgtctggtctgcatgtcggcgcgatctcgacctggattcgtgtccctggatgtcgagaggccagcgtggtgggggtgtccagcctcccggaggagtactatgccttgacaccttcgtttcaccgccccaaagctggcctggggctccgtagggagtggcctgcatggggagggcccgcgtgctgtgtttctgggaggggtaagagagtgggggcgcagggggcgggccaggtccctgggcgcggcgcgggctcgggggacccgcgcggctgacgtcaggccactccttaaatagagccggcagcgcgctccgctcggcatttcccgaagagccagatcgcggccggcgccagcgccaccgtccggtccacccgccagcccgcacagccgcgccgccgccgagcgtttcgtgagcggcgctccgaggatcaggaatggggcttcgggcgctgggcgcgctccgaacccggcgcacgtaagagcctgggagcgcccgagccgcccggctgcccggagccccatcgcctaggaccgggagatgctggaaatgcaaccgcctgttccccgaggagccgctgcccccgggaccccctggcactgtgcgcaccctggtcagcagcccccggagaagacggcgcccccaacgcccgacccgcgtggccgtggcagcgccacgcgagccctctaggcgaccgcagggccacagcagctcagccgccggtgccccctcggaaaccatgacccccggcgcgggcccatggagccatggcctatagggtcctgggccgcgcggggccacctcagccgcggagggcgcgcaggctgctcttcgccttcacgctctcgctctcctgcacttacctgtgttacagcttcctgtgctgctgcgacgacctgggtcggagccgcctcctcggcgcgcctcgctgcctccgcggccccagcgcgggcggccagaaacttctccagaagtcccgcccctgtgatccctccgggccgacgcccagcgagcccagcgctcccagcgcgcccgccgccgccgtgcccgcccctcgcctctccggttccaaccactccggctcacccaagctgggtaccaagcggttgccccaagccctcattgtgggcgtgaagaaggggggcacccgggccgtgctggagtttatccgagtacacccggacgtgcgggccttgggcacggaaccccacttctttgacaggaactacggccgcgggctggattggtacaggtaaggaccaggagctccgctccgtgcgccgggtctctgatcgcttccattgggagagccatccgtctcttgtgttttctctttcttttaacccaactcattgtatgggttcaggctgacacacagggccatggggggctatagcagaatttacccagaacttcccagtgataatctagacgggcagtttctggaactgcaaagggcgttccctcgtcactggagtcgttggaaaaggattatctccagtcaaacctaagtgccagctaaagggctaactccctctgtgaccagcccttagggtgcccaaggaagggacaggcgaggacctgtgctgcctgaacacggcaccatcctaaccctctgtaggtctttgctggtacccagcccctgaaggaccctgagaaagataaggcagttcagagaccccttgcagcaaggctc

SEQ ID NO: 114 - DNA, 5650 bp, Homo Sapiens
ttttggaagcacacctgcccttagtatcctgtttttccactgggtgctttctgcagatggccaacgtagccatcacattcggattcttcctgacttcattctcagaggattactttatcttgaagtgctgaaggctccaggcaccatctataacgacaactcccaactttccagctcatctccagcctgtgcttctccccgactcaactcattttcaaccacgtgctaggcctccacccttggatgtcgaagagccatctccagttccacccagttcatcttcatcagaacatctatgagtcgtcgtctctgcagtccatttgtttgcccgcttgggaacagcaagctccttaagggcaggactactaccgcgctctcagaggcgctgcactggaacatcgcgggcacagggcagcgttggtcactgctcctgggtactagggcagcaaataaacccagcagctgcgtctgtctgcctggagttggatctttttggtatagatccaaacgtagaagtataaggtctacgtttatgtacttgtcagatatttaatgacctccaacgatagacatgcccccccaacacctccttcagtctttttgattctttgagaatctttgaaccacgcaggatcctagccctagggtgcggtcggacttgccgcgacgccagccgccggggttccttcccgaggcgccgccatgggatccgcggtgacctacgaggggcggctgggtggtggccattgggcgacggcgcagggtcaagggccgggctctgggatcgtggggagaccgggggtcccggagccccccagccccgcaggccactgcctcgccgcccgacgtcacttccgactggagtcaagatggcggcggcgcggccgcgggcgccggggccggcgaaacagcggcggcggcggcggccctcggtgctctgaggcgctggcgcggcgggcgcgggtaaggagtggcgcgggtgggcggcctctgggctcgcgccgggacgctggtccctccccccgaggagcgcggcggcgacggcggcggcgacacgctggggacccggcgccgcagggatggccgggtcggcggacgcgccccctcagaggtcccgggcgtgccgggggccccgggacgaggcgcgggcctccgggtcggtggccccgcgggtgggtggcggcgccgggctcctccttgtcggccgtggggtccctgcggcgaagttcgggattcggtttgtcgccgtgaagagccgcgcgccccgcgggggacgcgtgcgggctgcagagactggccgggtgcgggcggcggtggggccacctggggccccacgtggggccgggcgccgtcccaattgtcaagccgctgtgcttttctcttttgtgttcccactgagtgtgtcttgcacatttgcactccaaatttgttttgtgtcttgcgtctttgtgtttcccaaatagtttttgtgtggttttaacctggagattgtctccctcaatgttcccatagacccacgggtgtatgtgtgtgtgtgcgcacgcgcgcgtgtgtgtgtgttacagacgtgcaactctgttactaattttgctaataaagctatcaatgaacctcttttgatggtggtaagtgagacatgaagtaaacctaacaggtcagtgtcattccccaaaccttcgtggttctttcgatccacgcgtgagccaccgaccctccgggcttgtagctttgtgtcgggctgtgagctgcggcaaagaccccatagttaaccgggaagtcctgatttccttaactacgcagctgaaatttcccctaacagaaatttcgtgctggcccctcacttttcttttagtgttgtattgagattttgggtgtatttgagacgtggaacgtcttttgctgaatcccagtaggtccttagatccctttaaccagacactagaagaatcatttttaccccagaactcgactaaaatgtttaagtttttgtttactccaggtttattaaaagtgaccgaaacttttaacaacaaatggaactcttcaatgatttcttttacaatggtacacacttcgcctcggtttgatcagttgtgtccaagtattagaaaaatgtaggccttttaaaaaaaaacatgataggaaatttacatatattaaggaggaggaactgagacacactgtcatacgttcttttttagtagggttctgtgtttttgagatggtccaaactgccccatcactcttgaggcttccggactaacacttattggccaaatttttacatgtagaatcttagtttagccttgagatgacctttaaagatcatttttattaaaccccctcatttcgagctatggaaacaaatcaaaattcacagtggaactaaaactcatttacattttctgtgattccagggctctttttactcaacacatctgttttggtttgattgaaataagttaatacattttaagtgcttagaaaagtgccagaacatgataatactgctcagtaaatgtttgcttttgttgattctgaaggtggtttctttaattgaaaggttggtatgttcaggtttgttttttccttattttgtggacagggcctgaaacagtacagtttaaatctgtaagaatgtattaattttgtaagtacaaaacataacaaaagattctcactgtagaaaattggaaagtagagaaaagcacaaagaagaaacagaaattgggcataaccttcccctcttcagataaccattgttaacgtttggcagatcttcctgtctctcttggtgtggatatgcgtatttctttccttattttacagttcattcacatatatatatatttatttacattttatacaggattgataatatagtgtgtatattgtttgcaacctgtcttgccttatgatacggtgagcatgtatccatgccactaactagtcaatattatgtttaatggctatttaatatgtggatgggccgtaagttatcaatcaagtccatattgatctgtaaggtttctcaagcctgagttttcttttcattaagatttgtttgaaagtttttttaaaatcgtgggttttaaagttctgtaatcttttgagattacagtgaaaaatataaattctgctttttagcatctaaataagcatttttcttgcgggtgcagtcataagaagtaacactcaatttcagcttcctttcttccgttcttggctgtggctgtgcagttatgtacatatatctgcgcctattcttttgatgattattttacgttagatgtttatttattcatgagactgtttctttaagcagcctgtttcttttcaagttccaaacctgatttacaaaccctttttaagtcctgttaaatcatagactttccaggatggaaagcaccttaggttatttactattttcatgtcttctgagtagcttttcatgttatttttaatactcatgcagaaaaaaaaccaaaacagcggacttctactagaaaactccataatggggagtggaagaggaggaggttgatggttgggggaaaatcgtcaaacttgcatgacgatgggtagctaagggagtttccagatgatgagggacatcacctgactgtccttaccacagataactgccgccctgtgtctagggcttcacgctttgtgcgctgagcaccagctatgctgtcacctatggttacaacatttggttagaggcctggggtggtggtccatctctctctttttgaagctacaagtttctagttagagctataaaaaccacctttatggagtgtctgaaagctgtggactccattactgaaaacaatacttagcttccattaaagcagagtttctcaacctctgcacttactgacatttgggtgagagaattctctgttgtggaggacgatcctgtacactgtaggatgttcagcagcatccctgtcctctatcagggagatgccagtagcacctccttccagtgtgacagccagtaaaatctccagacatttccaaatagcacttgaaccgctgcagtgaaggaaggctcatctaactgtatggttgaattattgaaacagattattgaatctctttaagaactgtaaggatagactagatggtttacaccttgaagccaagaagtggacttcaggtctgtccacgttcctttccacctttggttttgtgactttattgaatggtcagtttcagcacttttgcttcggcatcagttttgtggcatgaggtaaaacaatgtgaggtatcctggagatcataaaggagttttcatgacgtggaatcagcattcttagtatgcagattaaattatgaaatttgaataaatttgcatagagttgatgcgtggtaaataatttaagcatatagaccattatgctgaacagcgcagaaacaactgtcttctagaaaagcaacttggtccagcaaccccttgaagattgatggtagaggctatgctgtagtttttccgaaacctgtttttttgaaaacaaccaatttgaggttatgcacagaaatggtgagtttgccctgaggcaataaggcttacttttgaagtgcttacctaactttaacttaatacattataatttaaagatagttcattgatctttgtggaaaacatgcagcattaatgcagctttcctctagggggaaaagtataagttgccaaatccttatttgtaatctttctaagtgtagatagtattgattgaatttttattgtggcatacgtaatctttagtcggaatgtattgataaataaaacgtgaaaagagatgtgcttttggagctacatttggtaggggtggttttctgaattacagaacatctgtataatttcactggaatgaatgcatgtgtcgtttaaatattctttcttaaagagaatgcctttcattccccacccccaccttcctgaggcatgaattagagttattgtatgtagtaaatctggctcatttggaatgaaatatgcttacagtatttttcttagtactgtatagtatttattcttagagtcttggttcatgtcatgcctatactgtgttttcatttattagtcctttggaacatgcaataaaggagattttactgaatacttattattttccagccattttggtgaaaagaatattttgtagctcttgcaataaatcatactctgggttttgctttgaaagagctgaattacttcttggcacagcttgtctgaaatatgtaaagctaagtgcaagtgttagtttgattatagggggcagtctgtctggaaattggtaaaacccacacattttatatgtgcttatatgtagttctattaagacctatgttaaactctggtgggataattccgtggcactttcacataatttaaattatgccatgtaagagtcactaaacccttatatacttcagtatgaatcctgtacattgcccaagaccttgttaagagaatgtaaattaaatataaattggagtatcagtgtaaaagtgacattctaaatgttcctcactctgcgaggcttattttttagggactttgctataattctgaaagacttagttttacagtacatctgaaagtaggagttttcagaagtatggctcttgggataaa

SEQ ID NO: 115 - DNA, 2500 bp, Homo Sapiens
gacagtgtctttaccaccaccaaaaaagtaattaacttcaaactgtttttaaaaaagaaaacgtatttcccattaaaattacttccatgatgaccaacaaaacacaaccaaactccagatttataatgcaaaaatcccccaaacaaaatagtcaaggaaaagtgtaagtgaacagaaacagtgtgaatgcgtgtgcctggccacaacagttggcaaaggcacaagtgtctgcaggtgcggaggaggccgcagtagctcggggtggctgagggctaagacgtgctgtcagccatagggaaggaattccaggacactgcctgaagagtcaggtcctcccacccgggagcctgtttcccacgcgtgccagctacactttacaaaagaaaagagagactttgcaccaacctagctgagagcagccacgcagcaaaacgtgagtcactcagtgctcaatgcctggggtcaaaaaatagaggaaagaagaaggactaaaagcaaattagtttatgtatcatttgcaaaagttttcaaaatgtgctttgctctccatctgtcatacttctgcaggtgacagacgagtgaggacatttagagaaactcaggaacaaaccaggcccatccactggcgtcgaggctagtttcgaagacagaaaaacgccccacttctgtttgcactgtggctgcctgtggcccggccggggaggcggccgggagtgaggcctgatcgtccctggcgcctccacctccccaggcgcagaaggcgcccacgaggacccccagtgcccgacgttgccacggtctgggatcagaggcagggaccagggagccaggaactgcgccgcccccgcccctgccctggcgcgagggaagctcccctcacccgggcccagccctgcaggggggcgcgtggggtcagaccgcaaagcgaaggtgcgggccggggtgggcctcgcggagacaaaggccgggcctgcctgctctcagagggccccagcgcctgccaagaggaagtcctcgaggcccgggcagggaagggggcacgggcttcccagggcccgccggccgcagcaggaagttggccagggcacggccgtgagcggagcgggcagggctttctcaggagcgcgggcgaggccggcgctggaggggcgaggaccgggtataagaagcctcgtggccttgcccgggcagccgcaggttccccgcgcgccccgagcccccgcgccatgaagctcgccgccctcctggggctctgcgtggccctgtcctgcagctccggtgagcgccccgggctcctggcgcgcacggtggggcctgaggcctcggcgcccgctgcgcccccgccgctgcctgcgccgatcgtggatcccaggtccttccagcctcgcccggcgcccagagggctccgccaccccggggccccgcgcctgcagcccgcggcctccccctctcagggctgtctccagcctcgtgccgggatggaggccgcccctggcctggggacacccgtctgccccccgtctggagaccggctcctcatcctgcaaggcgcagcgcgagtgtcccctcccttgggggcctgtcccggaccctgcacagagttcaccggtccttccgccaccctcaggccactccggtgaccctgcagcgtctcctggcggggccgcctccccagacccgcctgtgtcccgggggctcgcacctggcaggcctcggcgcaggagggaggggcggtcggggagccgggcagggcgcgacggttcctgggcgcctcccgcgggggcgcgtcctggacctgccttctggggaccccggcgcgcaggcggtgacccctccctgttcgcttgcagctgctgctttcttagtgggctcggccaagcctgtggcccagcctgtcgctgcgctggagtcggcggcggaggccggggccgggaccctggccaaccccctcggcaccctcaacccgctgaagctcctgctgagcagcctgggcatccccgtgaaccacctcatagagggctcccagaagtgtgtggctgagctgggtccccaggccgtgggggccgtgaaggccctgaaggccctgctggtaaagtgggcaccccgggtgcccttcctgcgcgggcatcccttcccggccagcctcaaaactgcaccagaggtgtcccggccctacgtcagggctgtttcccgtcctgcccctccaagccctgtccctgggagaagcccgggtctccgggtgggaactgggtggggcgcatccgagctgcaggggcggggaaggcggagatggccccgcgcgggtgcgcgtcccccggagacgccagcggaaccgccccgctcccgctccccacagagccggccgctgccgcgcccccgcctgagttcttggtggcagggctgggggcactcaagctcggcttctgctttccagggggccctgacagtgtttggctgagccgagactggagcatctacacctgaggacaagacgctgccc

SEQ ID NO: 116 - DNA, 2001 bp, Homo Sapiens
gtaccacggtggccgtccccttctgttctgtgcagtggacttcctggctcctccttagccttggggcccccacagccctcggcttggcttccctccccatagccaggccctgggtaactccaggggaaagtgaccctgaggccccccacttctccccgtgtcctgcacaggccttgggctttcggcggtgctgtctgccgcagccccacgccttcctgggagagtggcccaggccccccttcctgagtgtgactgcgctgccgtctgcgaggcctgcgcgggtctcccccgggctgtccctgctgggatggggactggtggccccgggccacgtcctggatccggcttgctccttggtacaagcccgtacgggtcacggtcaggcaggagggcgggcggcggggtcccgggggcgccgagttcggggccgtgcggtccccaagagcaggctgtgcgtgtccctgttggagccccacgaaggcggcccagggccacccctgagggcgcgtgggcccgacccgcgtcccggatccagcttgcggccaggaatgcaggtgttccagggtgccaaaaggaaaacgcacaaggcctcgtcgaggagggggggtcaggaggggaccgggggtgggaagaacgcgggggagagggatggcagggtgcccgcccgagggaccgacacctccgcgagtggcaccccaggatgctgacgccggcgggggtgggggcccgaggggcggtcggggtcagggggcggccccaggggtagggccgcagcacgaggggccgcgtgaccccggcggtgaccgggtggggagaggccggcgccggggctgggagacggccgtgggtgggagggtgccccgtggggacgctcctgccgcagcgcccggccacgcgcgaggccccgccctcaggacgcgttcggcgggacggacccgcccaccccgcagccgcgcgcccgccgcgccgccttgtgggcgctgtagtcccggagtccgcgtgcgcggggccgggtccgggagccccagggcagccgccccgccgagtcgcaggtaccggtggggaacggggccacggggccgcgtgtcgggggctgcggggtgtctcggggccctggggtgagtgcggggcgcgggccgaggtttgcagggccctgtgaggtgagtgtgggggctggcgctggggtccgcggggccctggggagggtgcggggcgtgggccggggtctgcggtctgcagcctggggtccgcggggccctggggagggtgcggggcgtgggccggggtctgcggtctgcagcctggggtctggggggccctggggagggtgcggggcgtggccggggtctgcggtctgcagcctggggtctggggggccctggggagggtgcggggcgtgggccggggtctccgcgggggtcgcggtggcccgggcgcctggcagaaccgttgctgtgcagcgggtttcccgccgctcgctttccgccgcagcctgcgaatggggtggggagtcccggcccccagcctgccctccgcgtcatcctggggcgccaagtcccacccccgggtctggaggaaagcgtggatccggcgttcgcgcccaggcacgtgttgcttcgggacgggccagccggtgggtgaaccctgccagccacgcgtggggcgggcccctggcacatctccagaccattgtctcctgtgccagaagctttgtaggtgcaacttccccttggagcagctgtgggtgcggatccagcggagcaatcccgaggcgtctcagagagagcctggacagccgctggagcctttcccgagtgggtccttccaacaccgctacagcaggaaagccatccccctagggtcctgtccatcggaaactcctgtcctggggagtctggcctgcctggcctcaggacacaggccaactaagctggccccgaaatccagaatgcatccagagggaaggtgggataaagtccttggaggcgcctgttggccgcc

SEQ ID NO: 117 - DNA, 934 bp, Homo Sapiens
tgctgttgttattgcaaagatgttgccaaggataaaagcccatgcagatgcttcgggtttgggcaatcttattcctgcgcactgcttccccagacccctaagcttccccctccatttctcacaattccattcagggctcagagcaggtgactgcagcgatttggttccaataaaatcgaaagtaaacgtctcctgtgaaaagtcccgggctgtaaattagaaatgtttatgctgatttcccattgtatggaaaaagctcctgggcgaaacagctttgagcccgagaacgatttaaaaagctggagctgtgtacacagctctgagcgtttgaagttgtttaaccattgtgtgaccagaaagaagagtgacgcggcaggaagaagaagccgggtcttggggagagcggaggcgggtcagggtgggcaaaggcagccgatgccaggaatacaaccgcccttcgcgccgttccaaactaagagatggcagcggtttcccagcgcactgctggaagtgtgctccagtagacagggtgtgggcaagatgcgcgggcagacagtccgcactcgccacatgtgctggggtgcgagatctagatctgcgccatctcggctttcattccccattccctgtctctgttcgtaacgctcagagactgtttttcctcttttacatccacggccctgtcatttgaaggaaagggctggttggccagcatctaccgaacaaagactgggcgtcgtaggcagcaccaaaattaagactatttgagaaacttagagaaaaccgagggacagcgatgggtctagggctggataaggaataatgagcccttctcctccctccccacagacgcctccttcacgcgggaacccggtcctccttcttccgacgcagagagagaagcgattccacaggtggaaaatctgagaccggc

SEQ ID NO: 118 - DNA, 2001 bp, Homo Sapiens
gatttgggtgtaggatacctttcaaatagccttctactccatctatgaaataggctagctttggctcagtaaatttgctgtgtaatgattttctaatgagttaggctggctttaagcccctggttatttcgttgtaaccagttaggctttgcctcttgaagggccacctgggactgtcgtgcagtagattttcttttaacgccccagaatcaggtgctttctctgactttgtgtggctctactgaatcaaatctagcaagccacagaggctttcagacttttaagatacaatattcaaaggtgaggcaggctgtgaaaagcccagcggtccctggctgtccctgaacgcgactatttgcaggttggctttgagaacccggtcagagctgcgttaggaaaacggttcccgggaagctcctcagagagtagaatgaggaggtggattttgtgtgaaggaacaccttgtgtggctctggtggccaggaaagagctggcacaagctgaaagaaggcctgtggcgaagcggagggggacctaagtcagggacccccacctgcccccaggaaggatgaaaaggagacaaaaatcctaaagggaaaagccctccaggctgtaggccaatgagcggcgggaaggaggagtgaggctggggaacttctcccagagccagtcagagcggacggctgctgggaagccaatcagcgcgctcgagcctgcagcccctctgcagtagttatgccagagcgccctgtgtagagcggctgcgagcgggcagctgggctcggctgccgggagccaccgcgcgggctccgcaccctcctctcgcactgccttcgcccggtccccgcgccgcggtgccccagtggcccccgccgcgctccacgccgcgcccccgcaccccgccggctaccggccgcacaaccgccaccgccccctggccgcgcggctcgcctcgccccgccccgtccctcctcgccccgccccaccccagtcagccccgccctgccccgcgccgccaagcggttcccgccctcgcccagcgcccaggtagctgcgaggaaacttttgcagcggctgggtagcagcacgtctcttgctcctcagggccactgccaggcttgccgagtcctgggactgctctcgctccggctgccactctcccgcgctctcctagctccctgcgaagcaggatggccgggaccgtgcgcaccgcgtgcttggtggtggcgatgctgctcagcttggacttcccgggacaggcgcagcccccgccgccgccgccggacgccacctgtcaccaagtccgctccttcttccagagactgcagcccggactcaagtgggtgccagaaactcccgtgccaggtgaggaggggtcccttgagcgtgcctagcgcccagcggggagcaaggcgcgcgtggtggctgtaccctgagcgcgctagccccgccgggctgtagtcgtgcgccctgcagctgggcacttgggagtggtcggtgtgcctggggcctggctgggtctactgagggagggagagagggtgtgtgtggacggagcccacatcccccagtctcacgctgctgtcagggaaggtgtgagcgggaggaaccgtggggatcgccttctcgtgagcgcccgttttttggaagggcgagaaggtgggagctattttcccgggtctctgcgaactggcgccccacagccgagctggtgcctcatgaatttgccatccttgctcgcacatacgtgtcagaatttcagccttagctggaccacagctccagccatcccttccccaacgtacccccaccccccgccgcctttacccagcctgggtttcctaagctcacgggcccaagtgcaagcaaagttgaggacagatttctgagtctgcagtggcgggtgaagacacactgaggcaaacttttgagtaagagggtccccaaaatgaggagactgaaccttttccttcaaaacagcatcccttatataggttagcg

SEQ ID NO: 119 - DNA, 16 bp, Homo Sapiens
cagtgcccgacgttgc

SEQ ID NO: 120 - DNA, 16 bp, Homo Sapiens
tagacccgaggtgcgg

SEQ ID NO: 121 - DNA, 17 bp, Homo Sapiens
acccggcatccgggcag

SEQ ID NO: 122 - DNA, 16 bp, Homo Sapiens
agccggaaccggagcc

SEQ ID NO: 123 - DNA, 17 bp, Homo Sapiens
gcctgtgagcgcctggc

SEQ ID NO: 124 - DNA, 16 bp, Homo Sapiens
tggaagttgttggcag

SEQ ID NO: 125 - DNA, 16 bp, Homo Sapiens
ctatgggcctagtcgt

SEQ ID NO: 126 - DNA, 16 bp, Homo Sapiens
ccccagccagctgagg

SEQ ID NO: 127 - DNA, 16 bp, Homo Sapiens
ggtgtgggccactggt

SEQ ID NO: 128 - DNA, 16 bp, Homo Sapiens
tcagggccgaccgtgc

SEQ ID NO: 129 - DNA, 16 bp, Homo Sapiens
tcaccgcagtcggctc

SEQ ID NO: 130 - DNA, 16 bp, Homo Sapiens
gagtgaggcgcgaaac

SEQ ID NO: 131 - DNA, 16 bp, Homo Sapiens
aaggaccgagcgtgga

SEQ ID NO: 132 - DNA, 16 bp, Homo Sapiens
atcagggccgcgctga

SEQ ID NO: 133 - DNA, 17 bp, Homo Sapiens
cctctccgcagccgccg

SEQ ID NO: 134 - DNA, 16 bp, Homo Sapiens
cgcacgcggtccgccc

SEQ ID NO: 135 - DNA, 16 bp, Homo Sapiens
ccgccccaccctctgg

SEQ ID NO: 136 - DNA, 16 bp, Homo Sapiens
ctccggagacccggtc

SEQ ID NO: 137 - DNA, 16 bp, Homo Sapiens
tcttagcgccggggag

SEQ ID NO: 138 - DNA, 20 bp, Homo Sapiens
ggtataaaatcgtaaatcct

SEQ ID NO: 139 - DNA, 16 bp, Homo Sapiens
tatgtagtcgcgtagt

SEQ ID NO: 140 - DNA, 18 bp, Homo Sapiens
gcttagacacgaaatgtc

SEQ ID NO: 141 - DNA, 16 bp, Homo Sapiens
agctctgacgccgcct

SEQ ID NO: 142 - DNA, 16 bp, Homo Sapiens
ggaaacccagacccgc

SEQ ID NO: 143 - DNA, 16 bp, Homo Sapiens
gcgccccagaaacagt

SEQ ID NO: 144 - DNA, 16 bp, Homo Sapiens
ggcgactccggggact

SEQ ID NO: 145 - DNA, 16 bp, Homo Sapiens
gacgcccggggtgcag

SEQ ID NO: 146 - DNA, 16 bp, Homo Sapiens
agtccgcgggaccctc

SEQ ID NO: 147 - DNA, 18 bp, Homo Sapiens
agtcttcgccaccagtga

SEQ ID NO: 148 - DNA, 16 bp, Homo Sapiens
ccgggagcgcggctcc

SEQ ID NO: 149 - DNA, 16 bp, Homo Sapiens
gccttccgacccattt

SEQ ID NO: 150 - DNA, 17 bp, Homo Sapiens
atgcccgcacctggcct

SEQ ID NO: 151 - DNA, 17 bp, Homo Sapiens
ggcggcagcggcagccc

SEQ ID NO: 152 - DNA, 16 bp, Homo Sapiens
aggcggcgacagacca

SEQ ID NO: 153 - DNA, 16 bp, Homo Sapiens
agcaccccttgtagct

SEQ ID NO: 154 - DNA, 16 bp, Homo Sapiens
ggaatatgcgccctcc

SEQ ID NO: 155 - DNA, 17 bp, Homo Sapiens
aacttcaggcaaggtgt

SEQ ID NO: 156 - DNA, 18 bp, Homo Sapiens
ccaccaacgtgtctgaga

SEQ ID NO: 157 - DNA, 16 bp, Homo Sapiens
attgccgtacgcatgt

SEQ ID NO: 158 - DNA, 18 bp, Homo Sapiens
cttcctgcccgaacatgt

SEQ ID NO: 159 - DNA, 16 bp, Homo Sapiens
atgccgagaacgcgag

SEQ ID NO: 160 - DNA, 16 bp, Homo Sapiens
agcgatccgagcaggg

SEQ ID NO: 161 - DNA, 16 bp, Homo Sapiens
taggatccggaacgca

SEQ ID NO: 162 - DNA, 16 bp, Homo Sapiens
ctgctcctccccaccc

SEQ ID NO: 163 - DNA, 16 bp, Homo Sapiens
agagcaggagagacac

SEQ ID NO: 164 - DNA, 17 bp, Homo Sapiens
gccgaacgctatgagga

SEQ ID NO: 165 - DNA, 16 bp, Homo Sapiens
atggggcggacgaaca

SEQ ID NO: 166 - DNA, 16 bp, Homo Sapiens
gggcggctaagccgag

SEQ ID NO: 167 - DNA, 17 bp, Homo Sapiens
ctactaacggaggaagg

SEQ ID NO: 168 - DNA, 18 bp, Homo Sapiens
cccgccatgtgcacggaa

SEQ ID NO: 169 - DNA, 17 bp, Homo Sapiens
gagtactccgagtctgc

SEQ ID NO: 170 - DNA, 16 bp, Homo Sapiens
caagcgctaaccgagc

SEQ ID NO: 171 - DNA, 16 bp, Homo Sapiens
tgggctcgcagctccg

SEQ ID NO: 172 - DNA, 16 bp, Homo Sapiens
cgaggagacgcgggtc

SEQ ID NO: 173 - DNA, 16 bp, Homo Sapiens
caaaacgagggagcgt

SEQ ID NO: 174 - DNA, 16 bp, Homo Sapiens
cagccgcgtgcatgaa

SEQ ID NO: 175 - DNA, 16 bp, Homo Sapiens
atgaaaacgccgccgg

SEQ ID NO: 176 - DNA, 16 bp, Homo Sapiens
cagccgagaactccgc

SEQ ID NO: 177 - DNA, 16 bp, Homo Sapiens
ccgacagcagcttcag

SEQ ID NO: 178 - DNA, 16 bp, Homo Sapiens
gtgccgcagcggcatc

SEQ ID NO: 179 - DNA, 16 bp, Homo Sapiens
agtagcgccgggctcc

SEQ ID NO: 180 - DNA, 16 bp, Homo Sapiens
gaagccaccgcgctgg

SEQ ID NO: 181 - DNA, 16 bp, Homo Sapiens
gaccgatgcggtccat

SEQ ID NO: 182 - DNA, 16 bp, Homo Sapiens
ggcgcttcagccgatt

SEQ ID NO: 183 - DNA, 16 bp, Homo Sapiens
ctacccggccgggact

SEQ ID NO: 184 - DNA, 16 bp, Homo Sapiens
tcatgtagtcatcgaa

SEQ ID NO: 185 - DNA, 16 bp, Homo Sapiens
gagaagctacaagaga

SEQ ID NO: 186 - DNA, 16 bp, Homo Sapiens
caggcgtgcaagggct

SEQ ID NO: 187 - DNA, 16 bp, Homo Sapiens
taggcacgccaccagc

SEQ ID NO: 188 - DNA, 17 bp, Homo Sapiens
tcgcagagccccccccg

SEQ ID NO: 189 - DNA, 16 bp, Homo Sapiens
gtttctggaggccagc

SEQ ID NO: 190 - DNA, 17 bp, Homo Sapiens
aaggagctgaggagagc

SEQ ID NO: 191 - DNA, 16 bp, Homo Sapiens
gaagacgtggccgcgc

SEQ ID NO: 192 - DNA, 16 bp, Homo Sapiens
ctgacgctccccaaca

SEQ ID NO: 193 - DNA, 16 bp, Homo Sapiens
ctcgaaagaggcagaa

SEQ ID NO: 194 - DNA, 16 bp, Homo Sapiens
atgggaaaggcagcag

SEQ ID NO: 195 - DNA, 17 bp, Homo Sapiens
gagcaccctcgaaccga

SEQ ID NO: 196 - DNA, 17 bp, Homo Sapiens
acaagcgacttaacgat

SEQ ID NO: 197 - DNA, 16 bp, Homo Sapiens
cccacgtgaccgagcc

SEQ ID NO: 198 - DNA, 16 bp, Homo Sapiens
catttgtcgcgttgat

SEQ ID NO: 199 - DNA, 16 bp, Homo Sapiens
tgcaattcggggactc

SEQ ID NO: 200 - DNA, 16 bp, Homo Sapiens
ctggagatcgcgcttc

SEQ ID NO: 201 - DNA, 16 bp, Homo Sapiens
gagcgttgcggaagca

SEQ ID NO: 202 - DNA, 17 bp, Homo Sapiens
gccatcctcgagagctg

SEQ ID NO: 203 - DNA, 16 bp, Homo Sapiens
acagcctgtcccccgt

SEQ ID NO: 204 - DNA, 16 bp, Homo Sapiens
ccaaggggctaccgct

SEQ ID NO: 205 - DNA, 16 bp, Homo Sapiens
taagcagcagcctctc

SEQ ID NO: 206 - DNA, 16 bp, Homo Sapiens
atgggcacgtctaagg

SEQ ID NO: 207 - DNA, 20 bp, Homo Sapiens
aaatcagtcacgttatccaa

SEQ ID NO: 208 - DNA, 16 bp, Homo Sapiens
atgccggccattacgc

SEQ ID NO: 209 - DNA, 16 bp, Homo Sapiens
ccccgaccggagtaat

SEQ ID NO: 210 - DNA, 18 bp, Homo Sapiens
gggcccctggggcagact

SEQ ID NO: 211 - DNA, 16 bp, Homo Sapiens
ccaggcacgcaaggta

SEQ ID NO: 212 - DNA, 16 bp, Homo Sapiens
ctgacccgcgcccgca

SEQ ID NO: 213 - DNA, 16 bp, Homo Sapiens
gccgtgcggtccccaa

SEQ ID NO: 214 - DNA, 16 bp, Homo Sapiens
ccacgaaggcggccca

SEQ ID NO: 215 - DNA, 16 bp, Homo Sapiens
ggacttcgccggcacc

SEQ ID NO: 216 - DNA, 16 bp, Homo Sapiens
gaaccccgcccacggc

SEQ ID NO: 217 - DNA, 16 bp, Homo Sapiens
tttcccgaagagccag

SEQ ID NO: 218 - DNA, 16 bp, Homo Sapiens
aggccactccttaaat

SEQ ID NO: 219 - DNA, 16 bp, Homo Sapiens
tatatgtagttctatt

SEQ ID NO: 220 - DNA, 16 bp, Homo Sapiens
tagtttgattataggg

SEQ ID NO: 221 - DNA, 16 bp, Homo Sapiens
tctgaaatatgtaaag

SEQ ID NO: 222 - DNA, 20 bp, Homo Sapiens
aataaaggagattttactga

SEQ ID NO: 223 - DNA, 16 bp, Homo Sapiens
cctcgcctaccctcgg

SEQ ID NO: 224 - DNA, 16 bp, Homo Sapiens
tctggttaagcgttct

SEQ ID NO: 225 - DNA, 16 bp, Homo Sapiens
ctaggtccttcggctt

SEQ ID NO: 226 - DNA, 16 bp, Homo Sapiens
cacagtcggggtgaca

SEQ ID NO: 227 - DNA, 16 bp, Homo Sapiens
agtcgggcgccagcaa

SEQ ID NO: 228 - DNA, 16 bp, Homo Sapiens
ggatggcggaagtcca

SEQ ID NO: 229 - DNA, 17 bp, Homo Sapiens
gggaaggtggttttccc

SEQ ID NO: 230 - DNA, 17 bp, Homo Sapiens
ggaaatggggtaggtgc

SEQ ID NO: 231 - DNA, 16 bp, Homo Sapiens
tggagacagaatggag

SEQ ID NO: 232 - DNA, 16 bp, Homo Sapiens
ggcgctccccattccc

SEQ ID NO: 233 - DNA, 18 bp, Homo Sapiens
cctgggccccccacctca

SEQ ID NO: 234 - DNA, 16 bp, Homo Sapiens
cctcagacattaaaga

SEQ ID NO: 235 - DNA, 16 bp, Homo Sapiens
accgctcctggcattc

SEQ ID NO: 236 - DNA, 16 bp, Homo Sapiens
aactctcaaaataaaa

SEQ ID NO: 237 - DNA, 16 bp, Homo Sapiens
aaaatcttttctacat

SEQ ID NO: 238 - DNA, 16 bp, Homo Sapiens
tagcacgagttgggtg

SEQ ID NO: 239 - DNA, 18 bp, Homo Sapiens
tggagagggaagcgctcg

SEQ ID NO: 240 - DNA, 17 bp, Homo Sapiens
cagtgtgcgggtgagaa

SEQ ID NO: 241 - DNA, 16 bp, Homo Sapiens
cagctggggtcgcggc

SEQ ID NO: 242 - DNA, 16 bp, Homo Sapiens
cggcgggcgcggggcg

SEQ ID NO: 243 - DNA, 18 bp, Homo Sapiens
cgcggtggctcatgcctg

SEQ ID NO: 244 - DNA, 16 bp, Homo Sapiens
tgcccgggacatccac

SEQ ID NO: 245 - DNA, 16 bp, Homo Sapiens
ccggtacacacaggta

SEQ ID NO: 246 - DNA, 16 bp, Homo Sapiens
ttccccgcgcccctcc

SEQ ID NO: 247 - DNA, 16 bp, Homo Sapiens
cctgaaccgtccgcag

SEQ ID NO: 248 - DNA, 16 bp, Homo Sapiens
caggtggcccgccggt

SEQ ID NO: 249 - DNA, 16 bp, Homo Sapiens
cgccccacacagacag

SEQ ID NO: 250 - DNA, 17 bp, Homo Sapiens
ctggggctgctcctggt

SEQ ID NO: 251 - DNA, 16 bp, Homo Sapiens
tgcctgttgccaaggt

SEQ ID NO: 252 - DNA, 18 bp, Homo Sapiens
agactgcgatggtgccag

SEQ ID NO: 253 - DNA, 16 bp, Homo Sapiens
tttggagagtccagaa

SEQ ID NO: 254 - DNA, 16 bp, Homo Sapiens
ttccctcgcagttcca

SEQ ID NO: 255 - DNA, 16 bp, Homo Sapiens
gggccggggtcgaatt

SEQ ID NO: 256 - DNA, 17 bp, Homo Sapiens
cttccgaccgggggctg

SEQ ID NO: 257 - DNA, 17 bp, Homo Sapiens
cgcgccccgggcgcgtg

SEQ ID NO: 258 - DNA, 16 bp, Homo Sapiens
gggcggcgcgcaggac

SEQ ID NO: 259 - DNA, 18 bp, Homo Sapiens
ggcgccccctgcccgggt

SEQ ID NO: 260 - DNA, 17 bp, Homo Sapiens
tgcggcagcactcgagc

SEQ ID NO: 261 - DNA, 16 bp, Homo Sapiens
ggaagggcgagaaggt

SEQ ID NO: 262 - DNA, 20 bp, Homo Sapiens
ggaaccgtggggatcgcctt

SEQ ID NO: 263 - DNA, 16 bp, Homo Sapiens
cgggttctgtccaaag

SEQ ID NO: 264 - DNA, 16 bp, Homo Sapiens
aacatgacttacagcc

SEQ ID NO: 265 - DNA, 16 bp, Homo Sapiens
ccccattccaacccaa

SEQ ID NO: 266 - DNA, 16 bp, Homo Sapiens
ttagcgtggctcccca

SEQ ID NO: 267 - DNA, 17 bp, Homo Sapiens
tcgctagctctccccca

SEQ ID NO: 268 - DNA, 16 bp, Homo Sapiens
ctgtcagctcagggtc

SEQ ID NO: 269 - DNA, 16 bp, Homo Sapiens
ctgtcacgggctggcg

SEQ ID NO: 270 - DNA, 16 bp, Homo Sapiens
ggcagcacagtggact

SEQ ID NO: 271 - DNA, 16 bp, Homo Sapiens
aggtagatcgaggagg

SEQ ID NO: 272 - DNA, 16 bp, Homo Sapiens
cagccgtagagtcggg

SEQ ID NO: 273 - DNA, 16 bp, Homo Sapiens
caggtccccggattga

SEQ ID NO: 274 - DNA, 16 bp, Homo Sapiens
cggctgctcacaaagg

SEQ ID NO: 275 - DNA, 16 bp, Homo Sapiens
gcccccttcaccttgg

SEQ ID NO: 276 - DNA, 17 bp, Homo Sapiens
tctgccggacccctgca

SEQ ID NO: 277 - DNA, 16 bp, Homo Sapiens
aagttcaccggcgtct

SEQ ID NO: 278 - DNA, 18 bp, Homo Sapiens
acttcggaacccaagcgt

SEQ ID NO: 279 - DNA, 16 bp, Homo Sapiens
taatctcggacgcgga

SEQ ID NO: 280 - DNA, 16 bp, Homo Sapiens
ccacggtgaaggcgga

SEQ ID NO: 281 - DNA, 17 bp, Homo Sapiens
tcccggtctccgccaac

SEQ ID NO: 282 - DNA, 16 bp, Homo Sapiens
tgtgcgaagttaacgt

SEQ ID NO: 283 - DNA, 16 bp, Homo Sapiens
acaaagcggggctcta

SEQ ID NO: 284 - DNA, 16 bp, Homo Sapiens
aggaggcgagaaacct

SEQ ID NO: 285 - DNA, 16 bp, Homo Sapiens
agaaacctcggggcag

SEQ ID NO: 286 - DNA, 18 bp, Homo Sapiens
ggcagtaccgcccacaga

SEQ ID NO: 287 - DNA, 17 bp, Homo Sapiens
agtgtatcgtttctcgg

SEQ ID NO: 288 - DNA, 16 bp, Homo Sapiens
tgcgcaccgccagcca

SEQ ID NO: 289 - DNA, 16 bp, Homo Sapiens
accatcccggcggtga

SEQ ID NO: 290 - DNA, 16 bp, Homo Sapiens
caagtcgcgcaaggag

SEQ ID NO: 291 - DNA, 16 bp, Homo Sapiens
gtatcgcgagcctgga

SEQ ID NO: 292 - DNA, 16 bp, Homo Sapiens
gccggggccgatccga

SEQ ID NO: 293 - DNA, 16 bp, Homo Sapiens
aggactcgcctgcgcc

SEQ ID NO: 294 - DNA, 16 bp, Homo Sapiens
actagcgcttggcgtc

SEQ ID NO: 295 - DNA, 16 bp, Homo Sapiens
gcctagcgacggtcgt

SEQ ID NO: 296 - DNA, 16 bp, Homo Sapiens
tgtgtagcggcgacca

SEQ ID NO: 297 - DNA, 16 bp, Homo Sapiens
accagcgtctggccgg

SEQ ID NO: 298 - DNA, 16 bp, Homo Sapiens
caggccgcgtagccgc

SEQ ID NO: 299 - DNA, 16 bp, Homo Sapiens
aaccgtgcggctgaca

SEQ ID NO: 300 - DNA, 18 bp, Homo Sapiens
ttgcgcagaaaattcgag

SEQ ID NO: 301 - DNA, 16 bp, Homo Sapiens
aaaattcgaggccggg

SEQ ID NO: 302 - DNA, 17 bp, Homo Sapiens
acccgctccagcccgag

SEQ ID NO: 303 - DNA, 16 bp, Homo Sapiens
cccgatcgccccagga

SEQ ID NO: 304 - DNA, 16 bp, Homo Sapiens
acccgcccggagacgg

SEQ ID NO: 305 - DNA, 16 bp, Homo Sapiens
gaaaagacgcgacccc

SEQ ID NO: 306 - DNA, 16 bp, Homo Sapiens
caccgacgcccctggc

SEQ ID NO: 307 - DNA, 16 bp, Homo Sapiens
ctgatgcggagcccga

SEQ ID NO: 308 - DNA, 16 bp, Homo Sapiens
caggaacggcaggcgg

SEQ ID NO: 309 - DNA, 16 bp, Homo Sapiens
gccggaggcgcctgag

SEQ ID NO: 310 - DNA, 19 bp, Homo Sapiens
cagacttcgcagctcctta

SEQ ID NO: 311 - DNA, 16 bp, Homo Sapiens
tgggtacgcccacggt

SEQ ID NO: 312 - DNA, 17 bp, Homo Sapiens
gaagaaatcgcttttgt

SEQ ID NO: 313 - DNA, 17 bp, Homo Sapiens
cagcaggaccggctctt

SEQ ID NO: 314 - DNA, 16 bp, Homo Sapiens
aacgctgcgctgggta

SEQ ID NO: 315 - DNA, 16 bp, Homo Sapiens
cagcgttccgtggcca

SEQ ID NO: 316 - DNA, 18 bp, Homo Sapiens
tccggaagaaaagcgaat

SEQ ID NO: 317 - DNA, 16 bp, Homo Sapiens
gtccgctggcgcaaac

SEQ ID NO: 318 - DNA, 17 bp, Homo Sapiens
tacccggaagtgatcgg

SEQ ID NO: 319 - DNA, 16 bp, Homo Sapiens
cacccggaccgggcct

SEQ ID NO: 320 - DNA, 18 bp, Homo Sapiens
cagccgaaagcaggacgt

SEQ ID NO: 321 - DNA, 17 bp, Homo Sapiens
aggacgtctctgaccgg

SEQ ID NO: 322 - DNA, 17 bp, Homo Sapiens
agctaccgctaggaggg

SEQ ID NO: 323 - DNA, 16 bp, Homo Sapiens
gagtcgggctgcgatg

SEQ ID NO: 324 - DNA, 17 bp, Homo Sapiens
atgggctgcgattccca

SEQ ID NO: 325 - DNA, 18 bp, Homo Sapiens
cagcggtttcccagcgca

SEQ ID NO: 326 - DNA, 16 bp, Homo Sapiens
agatgcgcgggcagac

SEQ ID NO: 327 - DNA, 17 bp, Homo Sapiens
agacagtccgcactcgc

SEQ ID NO: 328 - DNA, 16 bp, Homo Sapiens
tctgttcgtaacgctc

SEQ ID NO: 329 - DNA, 18 bp, Homo Sapiens
agcaaacgaacaagaagt

SEQ ID NO: 330 - DNA, 17 bp, Homo Sapiens
cacgtcttcccggacca

SEQ ID NO: 331 - DNA, 16 bp, Homo Sapiens
taaccatcggcggtgt

SEQ ID NO: 332 - DNA, 16 bp, Homo Sapiens
ggacggcggaaaatca

SEQ ID NO: 333 - DNA, 16 bp, Homo Sapiens
tacttggcgacccgga

SEQ ID NO: 334 - DNA, 16 bp, Homo Sapiens
cagggccacgtgccgg

SEQ ID NO: 335 - DNA, 18 bp, Homo Sapiens
aacgaacttcccgacatt

SEQ ID NO: 336 - DNA, 16 bp, Homo Sapiens
aaaaccgtatgcgtgt

SEQ ID NO: 337 - DNA, 16 bp, Homo Sapiens
gccccgcgcccaggga

SEQ ID NO: 338 - DNA, 16 bp, Homo Sapiens
agtgcccgccgcagcc

SEQ ID NO: 339 - DNA, 16 bp, Homo Sapiens
ccttgtccgcgctgaa

SEQ ID NO: 340 - DNA, 16 bp, Homo Sapiens
gggccgcgaggtagcc

SEQ ID NO: 341 - DNA, 16 bp, Homo Sapiens
tctgtgcgacgccatc

SEQ ID NO: 342 - DNA, 16 bp, Homo Sapiens
atggcggcctcgacct

SEQ ID NO: 343 - DNA, 16 bp, Homo Sapiens
gcgctccagcgtgcgg

SEQ ID NO: 344 - DNA, 16 bp, Homo Sapiens
ggccgcgagtgcgggc

SEQ ID NO: 345 - DNA, 16 bp, Homo Sapiens
cccctcttccgcgcgt

SEQ ID NO: 346 - DNA, 16 bp, Homo Sapiens
ggggatgcaggctggg

SEQ ID NO: 347 - DNA, 16 bp, Homo Sapiens
gaaggaaatgggggga

SEQ ID NO: 348 - DNA, 16 bp, Homo Sapiens
tcccaacggcaccagc

SEQ ID NO: 349 - DNA, 16 bp, Homo Sapiens
cctgcgcggggaccta

SEQ ID NO: 350 - DNA, 16 bp, Homo Sapiens
gcccggtgatctcggc

SEQ ID NO: 351 - DNA, 17 bp, Homo Sapiens
gggaaatcgctgaggtc

SEQ ID NO: 352 - DNA, 17 bp, Homo Sapiens
ggcagccgggctggcac

SEQ ID NO: 353 - DNA, 16 bp, Homo Sapiens
ctggaagccgcatggc

SEQ ID NO: 354 - DNA, 16 bp, Homo Sapiens
tctcagggctggaagc

SEQ ID NO: 355 - DNA, 16 bp, Homo Sapiens
agtggaagctctaggt

SEQ ID NO: 356 - DNA, 16 bp, Homo Sapiens
aggccggagccacttc

SEQ ID NO: 357 - DNA, 16 bp, Homo Sapiens
ccaagaagggaagagc

SEQ ID NO: 358 - DNA, 16 bp, Homo Sapiens
gctgacgttggggtca

SEQ ID NO: 359 - DNA, 17 bp, Homo Sapiens
ttatcagtgtatcgttt

SEQ ID NO: 360 - DNA, 16 bp, Homo Sapiens
acctgtagtcgcccta

SEQ ID NO: 361 - DNA, 16 bp, Homo Sapiens
catcctcgccccttcc

SEQ ID NO: 362 - DNA, 16 bp, Homo Sapiens
ggaaaagtcaccggtg

SEQ ID NO: 363 - DNA, 16 bp, Homo Sapiens
tggggtctccccaagc

SEQ ID NO: 364 - DNA, 16 bp, Homo Sapiens
tctttcacagctgctg

SEQ ID NO: 365 - DNA, 16 bp, Homo Sapiens
gacactggtgggcaga

SEQ ID NO: 366 - DNA, 18 bp, Homo Sapiens
gcaggtcagtggcagaca

SEQ ID NO: 367 - DNA, 16 bp, Homo Sapiens
ctcctgggccaagctt

SEQ ID NO: 368 - DNA, 16 bp, Homo Sapiens
gcctccagggctgggc

SEQ ID NO: 369 - DNA, 16 bp, Homo Sapiens
aaggccagaccacggc

SEQ ID NO: 370 - DNA, 16 bp, Homo Sapiens
gaggagttgtggggcc

SEQ ID NO: 371 - DNA, 16 bp, Homo Sapiens
cgccgcctacgtgggg

SEQ ID NO: 372 - DNA, 18 bp, Homo Sapiens
gcgccgcgcgcccccggc

SEQ ID NO: 373 - DNA, 16 bp, Homo Sapiens
tggagaggaccctgcg

SEQ ID NO: 374 - DNA, 16 bp, Homo Sapiens
ccaaggggcggggtct

SEQ ID NO: 375 - DNA, 16 bp, Homo Sapiens
tgggcagatggcacct

SEQ ID NO: 376 - DNA, 16 bp, Homo Sapiens
ccaagtagaaagggaa

SEQ ID NO: 377 - DNA, 17 bp, Homo Sapiens
ggagactatgaagcgat

SEQ ID NO: 378 - DNA, 16 bp, Homo Sapiens
ggctgtgtgaagggtg

SEQ ID NO: 379 - DNA, 16 bp, Homo Sapiens
ctgcggttagaagcag

SEQ ID NO: 380 - DNA, 18 bp, Homo Sapiens
ggaagctcgaggttgcag

SEQ ID NO: 381 - DNA, 16 bp, Homo Sapiens
gcggtggctcacgcct

SEQ ID NO: 382 - DNA, 16 bp, Homo Sapiens
ggagaggcgcgttcca

SEQ ID NO: 383 - DNA, 17 bp, Homo Sapiens
agcgcacgggaaagtcc

SEQ ID NO: 384 - DNA, 16 bp, Homo Sapiens
ttcaaggacccaagct

SEQ ID NO: 385 - DNA, 17 bp, Homo Sapiens
tgtgcgcgcgcgcggct

SEQ ID NO: 386 - DNA, 16 bp, Homo Sapiens
atggcattgtgtgagt

SEQ ID NO: 387 - DNA, 17 bp, Homo Sapiens
ccctggtgagaggcgct

SEQ ID NO: 388 - DNA, 18 bp, Homo Sapiens
ctagctccccgccgctct

SEQ ID NO: 389 - DNA, 17 bp, Homo Sapiens
tacgagaggaaccctcc

SEQ ID NO: 390 - DNA, 16 bp, Homo Sapiens
taaagcgcctaccccc

SEQ ID NO: 391 - DNA, 16 bp, Homo Sapiens
aatggcgtgaccttag

SEQ ID NO: 392 - DNA, 18 bp, Homo Sapiens
ttgaatccgtctccatta

SEQ ID NO: 393 - DNA, 16 bp, Homo Sapiens
tacacattgggtggat

SEQ ID NO: 394 - DNA, 16 bp, Homo Sapiens
gtaaaacgcttggtgg

SEQ ID NO: 395 - DNA, 16 bp, Homo Sapiens
cttaacgtggctgggt

SEQ ID NO: 396 - DNA, 17 bp, Homo Sapiens
cagcttgtctcgtgacc

SEQ ID NO: 397 - DNA, 16 bp, Homo Sapiens
gagctttgcaacgggg

SEQ ID NO: 398 - DNA, 16 bp, Homo Sapiens
aaaaagccccgagggg

SEQ ID NO: 399 - DNA, 17 bp, Homo Sapiens
tttaggcaattatgaca

SEQ ID NO: 400 - DNA, 16 bp, Homo Sapiens
agcgggccgggtcagg

SEQ ID NO: 401 - DNA, 16 bp, Homo Sapiens
gggcagctaggaggtc

SEQ ID NO: 402 - DNA, 16 bp, Homo Sapiens
ggacgcggctgctgag

SEQ ID NO: 403 - DNA, 16 bp, Homo Sapiens
aactgcggaattcacc

SEQ ID NO: 404 - DNA, 16 bp, Homo Sapiens
agagggagcggtcgcg

SEQ ID NO: 405 - DNA, 16 bp, Homo Sapiens
gatgggtccccggggg

SEQ ID NO: 406 - DNA, 21 bp, Homo Sapiens
gtcataagagtcgccccgtgc

SEQ ID NO: 407 - DNA, 18 bp, Homo Sapiens
atatgtacacacacacgc

SEQ ID NO: 408 - DNA, 16 bp, Homo Sapiens
aagcttacattgtggt

SEQ ID NO: 409 - DNA, 17 bp, Homo Sapiens
actcgacgccgggcggg

SEQ ID NO: 410 - DNA, 17 bp, Homo Sapiens
gtttcctaacttctgat

SEQ ID NO: 411 - DNA, 16 bp, Homo Sapiens
aaactggaatcagatg

SEQ ID NO: 412 - DNA, 17 bp, Homo Sapiens
ggaaggaaatgcaaaaa

SEQ ID NO: 413 - DNA, 16 bp, Homo Sapiens
agcctctccagccagg

SEQ ID NO: 414 - DNA, 16 bp, Homo Sapiens
gcaagctcacggggcg

SEQ ID NO: 415 - DNA, 16 bp, Homo Sapiens
cacagggtcaacctca

SEQ ID NO: 416 - DNA, 16 bp, Homo Sapiens
gcctcacccagccaaa

SEQ ID NO: 417 - DNA, 16 bp, Homo Sapiens
ctttctccaaccaccc

SEQ ID NO: 418 - DNA, 18 bp, Homo Sapiens
gtacaggacatcagagaa

SEQ ID NO: 419 - DNA, 16 bp, Homo Sapiens
accgacccgctgctcg

SEQ ID NO: 420 - DNA, 16 bp, Homo Sapiens
ccccactactcgccac

SEQ ID NO: 421 - DNA, 16 bp, Homo Sapiens
gaaaaacaatcggtta

SEQ ID NO: 422 - DNA, 16 bp, Homo Sapiens
aacgagagagggggaa

SEQ ID NO: 423 - DNA, 20 bp, Homo Sapiens
gacaggggcggtacctatcc

SEQ ID NO: 424 - DNA, 16 bp, Homo Sapiens
tgcacgcgcgcgcgac

SEQ ID NO: 425 - DNA, 17 bp, Homo Sapiens
ccccagccggctgagag

SEQ ID NO: 426 - DNA, 17 bp, Homo Sapiens
acttctgccaacagtct

SEQ ID NO: 427 - DNA, 16 bp, Homo Sapiens
cttgaaaagctccaag

SEQ ID NO: 428 - DNA, 18 bp, Homo Sapiens
ctctagcggttccgagtg

SEQ ID NO: 429 - DNA, 16 bp, Homo Sapiens
ctcagtgcacgtgatt

SEQ ID NO: 430 - DNA, 17 bp, Homo Sapiens
cccgctgcccgcccggg

SEQ ID NO: 431 - DNA, 16 bp, Homo Sapiens
aggcggggactgcagt

SEQ ID NO: 432 - DNA, 17 bp, Homo Sapiens
agcgagcgcgccttggg

SEQ ID NO: 433 - DNA, 16 bp, Homo Sapiens
gtgcggtccccacggc

SEQ ID NO: 434 - DNA, 17 bp, Homo Sapiens
ttttttattaatagcaa

SEQ ID NO: 435 - DNA, 16 bp, Homo Sapiens
tcctgatcatgacgaa

SEQ ID NO: 436 - DNA, 18 bp, Homo Sapiens
tttttgttttcacatttt

SEQ ID NO: 437 - DNA, 16 bp, Homo Sapiens
ttcttcacctgtctcg

SEQ ID NO: 438 - DNA, 18 bp, Homo Sapiens
cactctgtcaaacttctc

SEQ ID NO: 439 - DNA, 16 bp, Homo Sapiens
acccccaacccccaac

SEQ ID NO: 440 - DNA, 16 bp, Homo Sapiens
gcatgggacctggtag

SEQ ID NO: 441 - DNA, 16 bp, Homo Sapiens
gatcacatctgctctg

SEQ ID NO: 442 - DNA, 16 bp, Homo Sapiens
tgagaggagatgccac

SEQ ID NO: 443 - DNA, 16 bp, Homo Sapiens
aaatccccacacccag

SEQ ID NO: 444 - DNA, 16 bp, Homo Sapiens
ctgcccggcccatctc

SEQ ID NO: 445 - DNA, 17 bp, Homo Sapiens
tctctgtggaacctcca

SEQ ID NO: 446 - DNA, 16 bp, Homo Sapiens
actgagagacccagag

SEQ ID NO: 447 - DNA, 16 bp, Homo Sapiens
ctgcgccaacccggca

SEQ ID NO: 448 - DNA, 16 bp, Homo Sapiens
agccgggagagcgaaa

SEQ ID NO: 449 - DNA, 16 bp, Homo Sapiens
ggccgaagagtcggga

SEQ ID NO: 450 - DNA, 16 bp, Homo Sapiens
atgccagcgggccgaa

SEQ ID NO: 451 - DNA, 16 bp, Homo Sapiens
ggcgcagaaggcgccc

SEQ ID NO: 452 - DNA, 16 bp, Homo Sapiens
gcagcgggcagtgcgt

SEQ ID NO: 453 - DNA, 16 bp, Homo Sapiens
aagacggccaggccgg

SEQ ID NO: 454 - DNA, 16 bp, Homo Sapiens
cggcatacactcccct

SEQ ID NO: 455 - DNA, 16 bp, Homo Sapiens
aatcccagctgctcgg

SEQ ID NO: 456 - DNA, 17 bp, Homo Sapiens
aaaaagtagccgggtgt

SEQ ID NO: 457 - DNA, 17 bp, Homo Sapiens
catagtgaaaacccgtc

SEQ ID NO: 458 - DNA, 16 bp, Homo Sapiens
acagggcgggacccca

SEQ ID NO: 459 - DNA, 16 bp, Homo Sapiens
cccgaagcgtgcacca

SEQ ID NO: 460 - DNA, 16 bp, Homo Sapiens
cccccgcgtctgcgaa

SEQ ID NO: 461 - DNA, 17 bp, Homo Sapiens
cccgctggagaccgtaa

SEQ ID NO: 462 - DNA, 16 bp, Homo Sapiens
ggacgctgcgactgca

SEQ ID NO: 463 - DNA, 16 bp, Homo Sapiens
gagaggccagggacgt

SEQ ID NO: 464 - DNA, 16 bp, Homo Sapiens
tccaaccccgaacggg

SEQ ID NO: 465 - DNA, 16 bp, Homo Sapiens
ccccgtcccgccttct

SEQ ID NO: 466 - DNA, 17 bp, Homo Sapiens
gaaagggggtgggggtg

SEQ ID NO: 467 - DNA, 19 bp, Homo Sapiens
ggcttcctgcttcagcctg

SEQ ID NO: 468 - DNA, 16 bp, Homo Sapiens
acaggggcaagcctag

SEQ ID NO: 469 - DNA, 16 bp, Homo Sapiens
cacccccggcagagca

SEQ ID NO: 470 - DNA, 16 bp, Homo Sapiens
gccggacggatccaca

SEQ ID NO: 471 - DNA, 16 bp, Homo Sapiens
aggtcgaataaagcgt

SEQ ID NO: 472 - DNA, 16 bp, Homo Sapiens
cactggcgtcgaggct

SEQ ID NO: 473 - DNA, 19 bp, Homo Sapiens
tcgggacagaagcccaccg

SEQ ID NO: 474 - DNA, 16 bp, Homo Sapiens
cctgcgaagagcgaaa

SEQ ID NO: 475 - DNA, 16 bp, Homo Sapiens
ggccgccacagagccc

SEQ ID NO: 476 - DNA, 19 bp, Homo Sapiens
acatgacttcggaatctta

SEQ ID NO: 477 - DNA, 16 bp, Homo Sapiens
ccgcgctgctgattgg

SEQ ID NO: 478 - DNA, 16 bp, Homo Sapiens
acgctttcacacaccc

SEQ ID NO: 479 - DNA, 16 bp, Homo Sapiens
tgcatcagatccaagg

SEQ ID NO: 480 - DNA, 16 bp, Homo Sapiens
aggtgggtaggcttgg

SEQ ID NO: 481 - DNA, 17 bp, Homo Sapiens
catcggggacagccgct

SEQ ID NO: 482 - DNA, 16 bp, Homo Sapiens
catcggcgtcaatagg

SEQ ID NO: 483 - DNA, 16 bp, Homo Sapiens
actgcacgcagggctg

SEQ ID NO: 484 - DNA, 16 bp, Homo Sapiens
aacaggcgatgcacgg

SEQ ID NO: 485 - DNA, 16 bp, Homo Sapiens
caaccgagcccagcgg

SEQ ID NO: 486 - DNA, 16 bp, Homo Sapiens
ttacctgcgccccgaa

SEQ ID NO: 487 - DNA, 16 bp, Homo Sapiens
ggtgcaggaaggacca

SEQ ID NO: 488 - DNA, 16 bp, Homo Sapiens
agaatgcgccggcagg

SEQ ID NO: 489 - DNA, 16 bp, Homo Sapiens
gtctcatcctccacat

SEQ ID NO: 490 - DNA, 16 bp, Homo Sapiens
cccataaaccctgcta

SEQ ID NO: 491 - DNA, 16 bp, Homo Sapiens
tcaggcaaggtgtccg

SEQ ID NO: 492 - DNA, 16 bp, Homo Sapiens
aacgtgacacgaccat

SEQ ID NO: 493 - DNA, 6435 bp, Artificial Sequence
  chemically treated genomic DNA (Homo sapiens)
atttttttttttatttttttatagtttttgaatttgtgggatagattgtggtagtaatggtaaatcgatttgtaattagttttaggtgtatatatatatatatatagtttgttatatttttttagttatagttattcgttttttttagtttttgttgtagttttttacgtttgttttcgtatatataattgtatttttttgtatttttggtttcggttattggtttggttttttagttattttttttcgtataattaagttcgtatttatatagttttatagttttagttgatattatagttttaagtaaatagttttgtatattatttattttttaaacgttgagtcgtttatagtgaggtttgttatttatataatttttgttataatttttgataatttttattgtagttttatgtttacgtagttttttatatgtggttttggttatttagtttgttttgttcgttattaaatagtgatagggttgtagttttcgtttttttttcgtagatattattttgtgtatattattataggtttttgtatagtattttgattatttatttaggtttagttattttttgaaatatagttataattttttatatagatatattattaaaagtttgtggttataatttttgtatatttttatatataattatagttttttacgtttttgatatatatatggttatcgatatgtagtttttattattgttttttatatacgttattatatcgttttttttataatcgatttttgttttatattttttatatatagttatgcgtgttacgtttagttagttttgataatattagagaaaaagtgttagtagtttttagtattattttgaaaaatatatatttataggaataattttttattttttgggattttttagaaaaaaaaaaggtttattttggggaagtaaaataaatagtggagacgagtgtagtattgttttttaaattattaatttttaggttttaaggtttgggttgggttagcgttaataggtgagtttaggagttttttgaatttatttttttttgtttagaatagagataggataggttttatgttttttattttttttttttaattttagggatattgaaagggttttttgtattcgttcgtaggaaattggggggttgggagggagggaattgaaaatttatgtttggtattaaaaataaatatttggagtgggggaggcggtaggaagatttttttttaaatttttttttttttatttattttattaaatataggaagagatgatttttttttttttattgaaaagttttatttaaaaatagattatattattaaaatggtagcgggggagagatagggagatttggagtattggttggaggggttttttagacggggattattttttaaaaaaattttttattgggaggaaataggtaggattttagggaggttggtagataaaggaatggttttttagggggaagaataaaagggatatttttttttggttaaaaagttggttgaaaaggataagttgtttgagagaaaggttggggaggtggaaatttttattttaagggtgtgatttttttttggttaagatttttaatttattaaatggtataaattttttttggatttttgagtatggttaggaataataaaataaaataaattaatttttttatttatatttaaaaacgtagatagggtttttttatttttttaagggtaggttgagaaataaagaaagaaaggtcgtttttaagttagatttcgattgttttgttttggggaaaaaagtggggaggtgggggagatgttttaattattttaaaaggttaggttaggttttttttagtggtttttaaaaaataaataaataaatcgtttttattattgaagtaggagacgtgtaagggcggttattgggggattgatagaaaatagagaagttgtggaagttgtgtgttttttgtggaggagataatgagagttatttttgggagtaattttttttaaggatttttattttattataattagagtatgagttttttagttgaattatgtttttttttgagatggttggttggagagagtatggatggagtgattttagaaggggtggtggtggtggtggtagtagttatggtttttggggttttggggagagtattacgggggtcgagaggttatttacgttgatagaagggatgtgtatttgggcgttgttattggatggaaattgggggtaaaaagagggagaggttatagatgggggttatttttgggttttttattttgtttaaaacggggaaagaggattttatttggaaggagagtttggtcgggttacggggcgtaatgggatttagggtgttttagaagtgaatgttaggaggtagcgagttgggtgttagtagtatcggggtttgtggggagagggtggtcggagtttaagtgagtagaaagtagatgtgggatgttggaagggatttggtttcggttttattatagattttttatttatatttttagggttattttttaaagtgtatatatttagatggtaattatggaggttatgtttatgattttttaaattttgtagatattttttattttttattttcgagagtttatttttagttgttgagattttattggttaagattatttataagattttatttaaatgttgtttttaaattttttaagttattattttaatagtttagggttaatttttaatttatgttttatttatgaaattttatatgtatattttagattaaaaagttttgtttaggttttttaagttatattttaatttagaaatagttttatagaaagattttcggttttatttataaaagtttttagttttgttttttattaattaaattttatttttttagttagtattagtttagttaattatatttaaaggttttattttttttaggaataattatatttatttttttttgatttttgttagttattcgttatatgttaattttattggtgttggcgtttatatattttattttttcgtaggtatttattaatgtatgcgtaggaagtagggatggggttagcgtcggtttcggagtttggaggtcggagttatttttcgattttggggttcgttcgggtttcggtttatttagtaggttcgggttgagtggaagttttaggtttcggggttttcggtttttttgcggttgggagattttagggttggaagtcgtatggtcgttcgtttgttttgcggtgtttataataatcgcgggtagtcgggttggtacgtttttttgtggagggatttttggttcggttttggtggtttttggtataaattttttttttttcgtaatttttaatttttttttgggtttttttatttttatttttgggggtaaagttcggtttaaattcggttttatattaagttttttcgattttaggtttggggtttcgggcggggttaggatgatttggtagaggagtaggtataaagagggtgtgtaaggattgttgggattataggatttttttgtgggttatttagtgattttttcgggaaggtggtatttggtatttagggtatgattgtatattagagtaagttttttaataggatataggatttcgttaaggaagtagggttttttttggggtaggtttttttatgggataggggatttggggtgagataatttgaagcgggtaggaatttgagggatattatttttatttattaaaatagtggtttttaaaaatttatttttttttggattagtaatatttgttttatttggtaataagttaaaaatgtaaattattgggtttttttttagttttataaatttagaaattttgggggtgtgtttggtaatttgtggtttaataagatttataggtgattttgatgagtattagagtgcgagaattagtgtattaaatatattttaggtatttatatgttcggtagttattaattgtagtatagtatttttttttttttgttttaggatttgtgtagttttttgttttatttttttttttaagaggatgttttttttttattattattttttttaacgggatagttatgttttttttattagtttttttcgttattcggggattatatattttttttttttattgtttttttttattgaatttttatattttagtttttatttgtagaggtaagtcggtttttttagtttttagataggtttttaaggggtttggattggtgtttttgtttttcgaggggggcgttgttgtttttgtaggagttgtattggggagtattatagtaggtcgaggatgagggggtggttgcggttgtagagattggatggtgaaggtggaatagaggttcgagcgtatgtattcgtttcggttgttgcgtgttaaatcgtttgggtttgttatttttgtatttttgggtgtgtttggttttttagagatagtgttttttggggcggtatgtatagtagtaggggttatatttggtatggtggaggtaatagatatttttggttggggcgggtagtttttagtggagtattttgcgattttagggtaggatataaatttgtagacgaatttttggtcgtttattttgcggatgatgttttaggaagggaggagaggaatagagggttttagaggaaaggggtaggttggaggtagggtgttaggggggaggaggggggtggagtggtatttttttttttttagtggttttttttttatttgttttttttcggttttttcgttttttttttgtaagttttttttttagtttatttttttttttattggtttttattttttttttttttcgttagattttttttatttatatttttttttagtttttttttttttttttttttttttataataattttttttttaagtttttttttatttatttttttttaagtttttttttgttattttttaggttcgtttatttgatttttttattttttttatattgtagtttttttttataatggggtttatgaagggtagtaggtgtgggagtaggttttttttttggttttaagaattagaggtttatagggttaggttttgtgggtgattgttaggatatagttttggagattagtaaatgtaataagataagaaaatgaagtaattgatataaatgttggaagaaagtaaattaatgtagatggatggggtgatgaattattaatatagaggattatttgaagttaatgatatagaagtggaatagggtaaggttattgtagaggagagggtgaggaggttttattattaatattattgtggaggttgaagttaaaatggtaagaaaatgaagtaattaatagtaattagataagaatattaaaaatattggtataaatattgggagggggtttatattaaggttggttttgttgggttatagagtatgtttggggttttttaggtttggtgggttttagagatgatttagtgtttttagagggtagagtgagatagttttattattaatattgttttggagggttgagtttaaggaataaaatatgaaaatggaataaatgttataaattatgaagggtgtgtagtatatgattagggtagttttgggagtgtggaggtattagggtattttgtggaagttttagtgttggttagatatgttatagggtgggtttgtgtttttcggaagaggaataaaaagggatatttatgaatattgtttgggaaattttagtagaaggattaagaaaatgaaataattggtataaatattggggggaggagaaatttagtagtggtttgggggtttgagagggtaggatgggggaaattttaaattttagttgtaggaataagataatgaaaataattgatataaatattggggtagattagtgtttttttgggaatttaagaagatagtgtgtggaagttggtattaaatatgttgttttagaggttttagtttaaggaataagagaagaaaataattagttaaaaatgttgggagttttagaggacgaagtaagtaaaagttggtataatattgttagggaggttttgattttaggaatatgaaatattttggaataagagaagattatgaaataattagggaagtttagtattggtttaggggttttagaggatagaatgaggattagttattattaatcgtgtttttaagatgttggttataggaatacggtaggaaaatgaaacgttgtgtatggtagggtagtattattttggggattttagagtgggagtagaaagagttagtattaataatgtagtggtggttttcgttaaagtagtaagataagaaagtaggtgagatagtgtttaggggtttaatattggttttagggtat

SEQ ID NO: 494 - DNA, 6435 bp, Artificial Sequence
  chemically treated genomic DNA (Homo sapiens)
gtattttaagattagtattgggtttttaaatattattttatttatttttttgttttattgttttggcgaaaattattattgtattattaatattgattttttttatttttattttgagatttttaaagtgatgttgttttgttatgtataacgttttatttttttgtcgtatttttatagttaatattttgaaaatacggttaataatggttggtttttattttgttttttgaaatttttggattagtgttgggtttttttagttattttatagtttttttttattttagaatattttatatttttagaattaaaatttttttgatagtattatattaatttttgtttatttcgttttttgggatttttaatatttttaattaattattttttttttttattttttaagttaaaatttttgaaataatatgtttaatgttaatttttatatattgtttttttaaatttttagaggagtattggtttattttaatatttatattaattgtttttattattttatttttatagttaaaatttaaaattttttttattttgtttttttagatttttaggttattgttgggttttttttttttttaatatttatattagttattttatttttttaatttttttattgaaattttttaaataatatttatgaatatttttttttatttttttttcgagaaatataggtttattttgtgatatatttgattagtattaagatttttatagaatgttttagtgtttttatatttttagaattgttttggttatatgttgtatattttttatagtttatggtatttattttatttttatattttattttttgagtttaattttttagaataatattagtaatgaggttattttattttgttttttgggaatattaggttatttttgagatttattagatttgaaaaattttaaatatgttttgtgatttagtaaagttagttttgatataggtttttttttaatatttatattagtatttttaatatttttgtttaattgttgttagttattttatttttttattattttagttttaatttttatagtggtattaataatgaggtttttttatttttttttttgtagtgattttgttttgttttatttttgtattattagttttaaataattttttgtattaataatttattattttatttatttatattaatttatttttttttaatatttatattagttattttatttttttgttttattgtatttgttagtttttaaaattgtgttttgatagttatttataaggtttggttttgtgaatttttggtttttggagttaggaagaagatttgtttttatatttattgttttttatgggttttattgtgaagaggagttatagtgtggagggagtgggaaaattagatagacggatttggagagtgataaagggaggtttggaaaggggtggatgggaaggggtttaaagaaaaaattattgtggagagaagagagaaaggggaggaattggggagggatatagataaggggaatttggcgggagaggaaagaggtagaaattaatgggagaggaaatgggttgagagagaaatttatagaggagggacgggaaagtcggagaggagtaagtgggaagaaagttattaggagaagagaaatgttattttatttttttttttttttttgatattttgtttttagtttgttttttttttttaaggttttttgttttttttttttttttttagaatattattcgtaaggtgagcggttagaagttcgtttataagtttgtgttttattttgaggtcgtagggtgttttattgaggattgttcgttttagttagaggtgtttgttatttttattatgttaaatgtggtttttgttgttatatatgtcgttttaggggatattgtttttggaaagttaggtatatttaagggtgtaggaatggtaggtttaggcggtttggtacgtagtagtcggaacgagtatatgcgttcgggtttttattttatttttattatttagtttttgtagtcgtagttatttttttattttcggtttgttgtggtgttttttagtgtagtttttgtaggggtagtagcgtttttttcggggagtaggagtattagtttaagttttttggaggtttgtttggaggttgaagaggtcggtttgtttttgtaggtaaggattggaatatagaaatttagtaagaggaggtagtaaagaggagggatgtgtaattttcggatgacgagggaggttggtagaagagatatagttgtttcgttaaaggagataatggtggaaggaagatatttttttagaaggaggggtggggtagagagttatataaattttgagatagaaaggggagaatattgtgttatagttagtagttgtcgaatatgtaggtgtttggaatatgtttaatgtattggttttcgtattttagtgtttattagaattatttgtaggttttgttaaattatagattgttaggtatatttttagagtttttgaatttgtggggttggggaggggtttaataatttgtatttttaatttgttattaaatgaggtagatattgttggtttagaggaaggtaaatttttgagaattattgttttaatgaatgaggatggtattttttagatttttattcgttttaggttgttttattttaagttttttgttttataggaggatttgttttagaggaagttttatttttttgacgaagttttatgttttgttggaggatttgttttgatgtgtagttatgttttgagtattaagtgttattttttcggggaaattattgggtggtttataggagaattttgtggttttaataatttttatatattttttttgtgtttgtttttttattaggttattttgatttcgttcgaggttttaaatttgaaatcggaagagtttaatgtggagtcgggtttgggtcgggttttgtttttagaagtgaaagtagaagggtttaaggaagagttggaagttgcgggggagagagggtttgtgttagaaattattaaggtcgagttagaagtttttttataggagggcgtgttagttcggttgttcgcggttgttatggatatcgtagggtaggcgggcggttatgcggtttttagttttgagattttttagtcgtagaagggtcggaagtttcgggatttagagtttttatttagttcgagtttgttaggtgggtcgggattcgaacggattttaggatcgggaagtggtttcggtttttaggtttcggggtcggcgttgattttatttttgttttttacgtatatattggtgagtgtttgcggaggggtggggtgtgtgggcgttagtattaatgggattggtatgtggcgggtgattgataggaattagaggagggtgagtgtggttgtttttgaagagggtggagtttttgagtgtgattgattgggttgatgttggttggagggatggggtttgattagtgaagggtagggttggggatttttgtgggtgggatcgagggtttttttgtgggattgtttttaggttggggtgtggtttaaggaatttgagtagggttttttggtttgggatgtgtatatggggttttatgggtgggatatgagttggaagttgattttgagttgttgggatggtgatttgagaggtttgagagtagtatttggatagggttttgtgggtggttttgattaatgaggttttagtaattgagggtgggttttcgggagtggggagtggggggtgtttgtagagtttgagagattataggtatggtttttatggttattatttaggtgtgtgtattttggggagtgattttgggagtgtgagtgggaaatttgtggtggggtcgggattaagttttttttagtattttatatttattttttatttatttgagtttcgattattttttttttatagatttcggtgttgttgatatttagttcgttgttttttagtatttatttttggagtattttgagttttattgcgtttcgtagttcggttaagttttttttttaggtaggatttttttttttcgttttggatagggtgagagatttaagaatggtttttatttgtgatttttttttttttttgtttttagtttttatttagtggtagcgtttaggtgtatattttttttattagcgtggatggtttttcgattttcgtggtgttttttttagggttttagaagttatgattattattattattattattattttttttggggttattttatttatgttttttttagttagttattttaaggagaaatatagtttaattgaaagatttatgttttgattgtggtggggtggggatttttgggaagaattatttttaagagtaatttttattattttttttatagaaaatatatagtttttataatttttttgttttttgttagttttttagtggtcgtttttatacgttttttattttaatggtaggggcggtttatttatttattttttgaaggttattgggaggagtttgatttaattttttagggtggttaggatattttttttatttttttatttttttttttaagataagataatcgaggtttggtttgagaacgatttttttttttttattttttagtttgtttttggggagatgagggagttttgtttgcgtttttggatgtgagtagaagagttagtttgttttgttttattatttttggttatatttaggggtttaggaagaatttgtattatttaatgggttgggagttttggttaaggaagaattatatttttggaatagaaatttttatttttttaattttttttttagatagtttattttttttaattaattttttggttagggaggaatgttttttttgtttttttttttgagaagttatttttttgtttgttaatttttttggggttttgtttgtttttttttaatggagggtttttttggggggtggttttcgtttggggggtttttttagttagtattttaggtttttttgtttttttttcgttgttattttgatagtataatttatttttaaatggggttttttaataggggagagggagttatttttttttatatttggtggggtgggtgggaaggaagggatttgggggggaatttttttgtcgttttttttattttaagtgtttatttttgatattaaatatgaatttttagtttttttttttttagttttttaattttttgcgggcgggtataaaggatttttttaatgtttttggagttgggagggaggaatgggggatataaagtttgttttgtttttattttaggtaagagagagtgggtttaaaagatttttgggtttatttgttagcgttggtttagtttaggttttgggatttgggggttggtgatttgggggatagtgttatattcgtttttattgtttgttttatttttttaaaatggattttttttttttttaaagagttttagagaatggggaattgtttttgtaaatatatattttttaaagtgatgttggaggttgttggtattttttttttgatgttgttaggattagttgagcgtgatacgtatgattgtgtgtggagggtgtgaggtagaggtcgattgtgagagaaacggtgtgatggcgtgtgtgagaaataatagtagggattgtatatcggtaattatgtgtgtgttagagacgtggaaagttgtgattgtgtgtgagagtgtgtagaagttgtgattatagatttttgatggtgtgtttatgtgggaaattgtggttgtgttttagaaaataattgagtttggatgaatagttaaggtattgtataagaatttgtgatggtatgtataaaataatgtttacgagaagggaacggggattgtagttttgttattgtttgatggcgagtaagatagattgggtgattaaaattatatgtgagagattacgtgggtatgaaattatagtagaggttgttagggattgtggtaaagattgtgtaggtgataaattttattgtaggcgatttaacgtttgagaaatagatgatgtgtaaaattgtttatttgaggttgtagtgttagttaaagttgtaagattgtatgggtgcgaatttgattgtacgggagagaatggttgggagattaaattagtgatcgagattaaagatataagaaggtgtaattgtgtgtacgaaagtaggcgtgagagattgtagtaaagattgagaaaaacgaatggttgtgattgggagagtgtgataggttgtgtgtgtgtgtgtgtatatttgaaattagttgtaaatcgatttattattattattatagtttattttataggtttagggattgtgagaaagtaggagagaaaat

SEQ ID NO: 495 - DNA, 2470 bp, Artificial Sequence
  chemically treated genomic DNA (Homo sapiens)
gtggaatatattttttatatagttatattatttaaaatttattgtttttaagtttttatttaaatgttttttcgtgaagttatttttgagttttttttaaaattgtagttttttatttttgtattttttattgttttttatttttaatttttgttattgtagttagaattatttgatatatagtttttattttattggttttttgttatgtttttttttataagaatttgaagtttattaggtcgggagttttgtttgttgtgtttgttgttattttttagtgtttaaaattgtttggtatatagtaggtatttaataatttttgaattagtgaaaattagatggtggtttggtatttttatataggaatgagttaggtggaaattatttaggatataagtagattttgaagtgataaggaagggttattataattatgtggggtttattttgtttttttttgttttttttttttaggtttagtaatagttttattaaggattttatgaatattaaagtttatatttatatgttgttagaggtgagagtagtttattttattattagattttgtgtttagggtggtgatttgaagaaggaagagagcgaaagaagggaaggattatttttttttttaaattggagttaagggagggaggttagagtaagtttgggggcgtaatttagatttagtttttgtttaattttttttgtttttttttttaggggtttagagaattataaggtttgtagaattttttagagaagttttattattgattttttttttttatttttagatattaaagagtttgaatgtttttgagttatatggtttttttttttttttataaattttgttagttgttacgggggtttgtttttagggtataaagttattgagagatttagagatttagtttttttgtggaatttttaaaatgttttagtagttttgtttttagtttgttgtttggtagtatttgttagttgattttatgtattgtttttttttttgttattttggtaatttgggttttttattttatttttttttttatttttttttttagacgttattttttgaattgttatagagaatgggttaatttatggtggaggtttgtttatttttataataattaaagggttttaaggtttacgtttttatatatttaattattttttaggtattttaaattatatttaaattttaatttagttttattttgttttagtttttgtttgtaagtgttttagtttttaatgggtatagatttggatttcgttttttttagtcgggtttttattttaggttgagtttagttatcgttaattaatgtagagttaggttttttttttttttaattttggtcgtagtttaattttgttttttgaaagtatttcgtttttgttatttaatgttttttcgtgtgtttgatagttattttgtttttttattttcgttgtgttttaaattcgtttttatttagttttatggttttgtttaatcgtagagttgttttgttcgtttacgcggagtttagttcgatttattttcgtcggttgttacgtttatttttatataagttttgttttcgttgagtagtatggcgtgcgatatcgtttttttggtgttttggtaggggtttagaagtttttcgttcgttaattagagaaaaatagggttatttattttcgtttttgggggttgttttttattaattttatgtaagttaattagtgtgaggtagattttcgttttttcgatataggtttcgagtttttttagttgtttatagttcgttagtttttgagttaatcggcgtggagtatcgtgaaggtcgaacgcgttttttcgggattttaggggtcgtgagcgttttattatttttttttacgttaattacggtatagttttgtagggaagggttcgttttttaatttttcgaggttttgcggtcgattaatagcgttttggttaattagcgagcggcgggatattgggtttttttttttcgggtttacgtgagttgtagggaaacgtaggggcggtttttaggtgttgtcgtcgttatcgttattattatttttatcgtcgtttcggaatttaggtttggggggcggtggggtcgcgtatggagttttcgtttttcggagttgttaatattgttaacgttatcgttacgttatatataggtgagttttgggtttggagggtggagggtttagttcgtgattttacgtatttttttcgttttcgcgtagaggatgtggtttggtcggtggtttgttggtgttcgatttttcgtcgttattattacggttggtggatttgcgtgtggtattgtttaagtttttcgttttttatagtggatttgatcgtggtttaatttttttttttcgttgtataatggatcggtttgcgtgtttatgtttttttttacgttaatttagggtggattcgttt

SEQ ID NO: 496 - DNA, 2470 bp, Artificial Sequence
  chemically treated genomic DNA (Homo sapiens)
ggacgagtttattttaagttggcgtggggaaaaatataagtacgtagatcgatttattatataacgggagggggaggttaggttacggttagatttattataagggacgaagggtttgagtaatgttatacgtaggtttattagtcgtggtggtggcggcggggagtcgaatattagtaggttatcggttaagttatattttttgcgcgggggcgggaaggatacgtggggttacggattgggttttttattttttaggtttagagtttatttgtgtgtagcgtggcggtggcgttggtaatgttggtagtttcggggggcgggggttttatacgcggttttatcgttttttaggtttgggtttcgaggcggcggtggaggtggtggtggcggtggcggcggtagtatttagaagtcgtttttgcgtttttttatagtttacgtgggttcgaggaggaggagtttaatgtttcgtcgttcgttgattggttaaagcgttattaatcggtcgtaaggtttcgaggggttgggggacgggtttttttttatagagttgtgtcgtgattggcgtaaggggaaatgatggaacgtttacggtttttggagtttcgaggaggcgcgttcggtttttacggtgttttacgtcgattggtttaaggattgacggattgtgagtaattgaaaaggttcggggtttgtgtcgggggggcgggggtttgttttatattgattggtttatatgggattgatggaagatagtttttaaggacgggggtgggtggttttgtttttttttgattggcggacgagggatttttagatttttgttaaaatattaagggggcggtgtcgtacgttatgttgtttagcggaagtagggtttgtatagaaatgggcgtagtagtcggcgggagtgggtcggattgggtttcgcgtaggcgggtagggtagttttacggttagataagattatagagttgggtaaagacgaatttagaatatagcggaggtaggagggtaggatggttgttaggtatacgaaagagtattgagtggtagaaacgaaatgtttttagagggtagggttgaattgcggttagagttaaaaaggggaggaatttggttttgtattgattggcggtggttggatttaatttagaataggggttcgattagggagagcgggatttaggtttgtgtttattggaagttggaatatttataagtaggggttaagataaggtagggttgagttagggtttgggtgtaatttggggtatttggggaatgattgggtgtgtgaaagcgtaaattttagggttttttgattgttgtgggaatgaataaatttttattatgaattggtttattttttatggtaatttaaagggtggcgtttaggaaaaggaatggaagaaagggtgaggtggggggtttaggttgttaagatgatagaagagagggtagtgtataaggttaattggtaaatattgttaggtaataggttggaggtaggattgttggggtattttggaggttttatagagagattggatttttgggttttttagtaattttgtgttttaggaataggttttcgtggtaattagtagggtttatggggaaaaagaagggttatgtgatttaaaggtatttaggttttttaatgtttgaggatggggggaagaagttaatggtgaggtttttttgggaaattttgtaggttttgtagttttttaagtttttgaaaaagaggatagaagagattgaataaagattgggtttgggttacgtttttaggtttgttttgattttttttttttgattttagtttagagggaaagatggttttttttttttttcgtttttttttttttttaggttattattttaaatatagagtttggtagtggggtgagttgtttttatttttagtaatatgtggatatgggttttgatatttatggagtttttggtgaggttgttgttgagtttagagaaaagaaataagaaagggtaaaatgggttttatatgattatgatgatttttttttattattttaagatttatttatattttggatgatttttatttggtttatttttatgtggaaatgttaagttattatttggtttttattgatttaaagattattaaatgtttattgtatgttaggtaattttaggtattgggagatagtagtaaatataataaataaaattttcggtttgatggattttaaatttttgtaaagaaagatataataaaaaattaatggaataaaagttatgtgttagatggttttaattataataataaaaattaaaaatgagagataataaggagtataggagtggggggttgtaattttaaagagggtttagggatggttttacggagaagtatttgagtaaagatttaaagatagtgaattttgagtagtgtggttatatggaggatgtgttttat

SEQ ID NO: 497 - DNA, 2408 bp, Artificial Sequence
  chemically treated genomic DNA (Homo sapiens)
attttttgaagtgttagattggagttgattggtgattaatttaaaggagttataatttaaagaaatggtgagagtttggtatttaggtttggtttttaggtaattcgtttgggtttgagaggttattaattgttagttaagatggaattttttttttttttttttttttttaatggataataatgggaagggggttaattttttagtagttgaaattttgtatttagttttttattttgagaatgttaatttttggttcgaggatttgtttttgtagtgttggtatcgagatttaagggaagatatttcgttttaaatgttagttacggtttggtttttttttcgattttagtattttgtagattgttagtgtttgtggcgggggacgaaaggaatagggttttgtaaggtttgtttgtcgattgcgttattttgggcgaaatttagttttaaaagttataaattatttacggtgaagatttttcgaagtggaataaatttttagattcgtattattttatatttttgcgggatagatggtttttatttatcggttatcgggagagagttgttgttttcgcgttttattgtttttcggggcgatttttagcgagtcgagttttcggttgtacggtaagcgttcgaaagtcgggtttgagaggattgtagggtttttgagggtgttaagtttcgaaggagtttacgggtgtattggggttttcgaaatttagtcgttattggtagtttttttttgtttttttttagttttttcgttcggtttcgtattttttttttttttttttttttttattttttttttttttttttgtttttatttcgtgtggggagtgacgtgacgttagtagagattttattaaattttattgtatagtggcgcgcgggcggtcggtcgagttcggttgcgcggttggcgatttaggagcgagtatagcgttcgggcgagcgtcggggggagcgagtaggggcgacgagaaacgaggtaggggagggaagtagatgttagcgggtcgaagagtcgggagtcggagtcgggagagcgaaaggagaggggatttggcggggtatttaggagttaatcgaggagtaggagtacggatttttattgtggaaaggaggattagaagggaggatgggatggaagagaagaaaaagtaatttgcgttaattcggtagttttaataaattaaagggggagcgttagggtagcggggagatagaaacgtatttttggggagtaaattaggacgggttgggaggaagcgatagggaaagtggtttaagagacggaataaaggataatgtttatggggttgtttgggacgaggcgtgtggagtgtgggtgtgagcgtgcgtgtgtgatttttttttaggtttgtagagttgaggaaagaggttatagtaaagagggattgcggagggaggaaagtgagagatcggtagagggcgggagtggaggtgggcgcggtggggatgggagaggatgagtgaagagaaatttagaagaatggagtgagttagtgggagagggtgggagggttatagtcgggagcgaacgagttaggtttgttagttggggaaggtcgggacgttgggtttagtttagttgggatatcgcgttcgaggttaaggcgggtggattaggtatgttgagagtgtcggcgtataggtgggtacggttacgtattgatttagtgtttacgaagggtttgtattggataaggtttagacgtttatagagtttagaattttttttgttgtatttatatttaataagtttattttgggttacggatattttattttttaaaatgacgaggttaaggtttttggcgaggatggtattaaattgtacgggatagaagtgggggtgggggagagagttttttttaagtttatatttgtttttgtaaagtaaagagtatgtgaaattatagggtatatttttattcgaaaagtgtgttttatttttgaattttgattttttgattttttgatttgagtaaagatgtgtattttggtagtgagtagaatattttggttttgttttgtttttgagtggaaggattataaatataattcgtttggaggattaggtgtgaaggtttttgttaggtatatgggataatgtttttttaattttaagggtattttgttaatgtatgtttttggaaagtgtcggaatatagttattgtttttggattcggatttttttattaatattaatttttgtttgagagtaaaatttaggttcgttattaaaaagatatttttttggtttttaattgagaataaagttttttttaaaagttgtattgttttttttaaattaatatattaatattcgtaattttagaaatatatagtgattcgggagaatgtgtataaa

SEQ ID NO: 498 - DNA, 2408 bp, Artificial Sequence
  chemically treated genomic DNA (Homo sapiens)
tttatgtatattttttcgagttattatatatttttaaaattgcgagtattggtatattgatttaggaagagtaatataatttttagagggaattttatttttaattagggattaaagagatgtttttttaatagcgggtttgagttttgtttttaagtaggaattaatattggtgggaaaattcgaatttaggagtaatggttgtgtttcggtattttttaaaaatatatattaataggatgtttttgagattgaaaaaatattgttttatatgtttggtagaagtttttatatttggttttttaggcgaattatatttatagtttttttatttagaggtaggatagagttaaaatattttgtttattattaaaatatatatttttgtttaagttaagaaattagaaaattagggtttagaagtaaggtatatttttcgagtgagaatatgttttgtaattttatatattttttgttttgtaggagtaaatgtggatttgagggaaatttttttttttatttttatttttatttcgtgtaatttaatattattttcgttaggaattttaatttcgttattttaaaaaatgagatattcgtgatttagggtgaatttgttgaatgtaggtatagtagaggaaattttagattttatgagcgtttgagttttgtttagtgtaaatttttcgtgaatattgggttagtgcgtggtcgtgtttatttgtgcgtcgatatttttagtatgtttggtttattcgttttgatttcgggcgcggtgttttagttaagttgggtttagcgtttcggttttttttagttgataagtttagttcgttcgttttcggttgtggtttttttatttttttttattagtttattttatttttttagatttttttttatttatttttttttatttttatcgcgtttatttttattttcgttttttatcggttttttattttttttttttcgtagtttttttttgttgtgatttttttttttaattttgtaggtttgaaagaaggttatatacgtacgtttatatttatattttatacgtttcgttttaaataattttatgaatattgttttttgtttcgttttttgggttattttttttgtcgtttttttttagttcgttttgatttgttttttaaaagtacgtttttgttttttcgttgttttggcgttttttttttgatttattagggttgtcgggttggcgtagattgttttttttttttttttattttatttttttttttggtttttttttttatagtgggagttcgtgtttttgtttttcggttggtttttaagtgtttcgttaggtttttttttttttcgttttttcggtttcggttttcgatttttcggttcgttggtatttgttttttttttttgtttcgtttttcgtcgtttttgttcgtttttttcggcgttcgttcgggcgttgtgttcgtttttggatcgttagtcgcgtagtcgggttcggtcggtcgttcgcgcgttattgtgtagtggagtttggtggaatttttgttgacgttacgttattttttatacggagtaggagtagagggaagagagagggatgagagggagggagaggagagagagtgcgagatcgagcgagaaagttggagaggagtagaaagaaattgttagtggcggttagatttcggaggttttagtgtattcgtggattttttcggaatttggtatttttaggagttttgtagtttttttaggttcggttttcgggcgtttgtcgtgtagtcggaggttcggttcgttggaaatcgtttcgggaagtagtgggacgcggagatagtagttttttttcggtagtcggtaagtggaggttatttatttcgtagggatgtgagataatgcgagtttggaaatttgttttatttcggagaatttttatcgtaggtgatttgtggtttttggggttaagtttcgtttaaggtaacgtagtcggtaaatagattttgtaaagttttgtttttttcgtttttcgttatagatattaataatttatagggtgttgaagtcgagagggaagttagatcgtggttggtatttaaaacgaggtatttttttttaaatttcggtgttaatattgtaggaataaattttcgggttaaggattagtatttttaagataaagggttgggtataaagttttagttattggaagattagttttttttttattgttatttattgggaaaaaaaagaaaagaaaaagattttattttaattggtagttagtgattttttaggtttaagcgaattatttgggagttaggtttggatgttaagtttttattatttttttggattgtaatttttttaaattgattattagttaattttaatttggtattttaggagat

SEQ ID NO: 499 - DNA, 2378 bp, Artificial Sequence
  chemically treated genomic DNA (Homo sapiens)
attttgagattttagttgattttttttgttttgtaattagaggggattgtgatttgggttaattttttttttatgggttttagtggagttagttgtggaatggaatattaatttttattttataggtatgttgtgaggtttcgttaagaaatagttataaaagggttttaagagttatgatgattgttttaattatttagtagggagggggtatttagcggtgttgtttttacgtatcgatgttacgtggggcggggaggcggggcggagaacggagagcgtttttttattttttattttttttttttaagtttagcgtagggggaggtggttgcgattgattgaggggttagggaaggttggttaggggcgtgggcgtggttggggacggtttgggggtggggttgcgtaggaggttggaggagtttcgcgggatttagaggcggggcgtcggttcggggattattgttttttcggggcgtggttgtaggaggttggaggagtttcgcgggatttagaggcggggcgtcggtcggggatcgttgttttttcggggcgtggttgttgtcgagtattttttagtttagtcgagttcgtgtttaggttacgttttgttttagtcgtcgttttttttattttacggcgttcggagttatttttcgtttgttcgtttttttttttcgtttattttttgtatttgggtttgtattatttttgttaatcgttttttcgattttgtcgatattttttttttaaatttttgatcggtatttttgtttggtatttttttttttatttttttttttttatttttttttttcgatttttttcgggtttttttttttttaaaattcgggttttttcgcgtggtttcgtttttaggtcggggatgtttttcgcggtttcgcgtttatggttttgacgttgttttttttcgtttataagttgtgtcgttttttcgttatgtcgggtttacggcggggcgtcgagcggttggcggtgtttgggttagatgggggcggtggtacgggtttatggtgggttgcgggtggttcgggttcgcgaaagtgtcgtcgggggtaggtatcgaggtgtaggacgttttggagcgcgcgttgtcggagttgtagtaggttttgttcgcgttgaagtaggcgggcggcgcgcgggtcgtgggcgtcggtttggtcgaggttttttaattggtggaggaggtttggttgttgcggtcgtgggtcgcgaggtagtttagggtttgtgcgacgttattcgtttcgatggcggtttcgatttgttgttgcggttgttgtaggcgtcggagttggagacgcgtgtgtaggtcgcgcgtttgttggagtagattttggtggttgagaatcggtgagcgcgttaggtcggggttgggagagcgtcgcgtggtgtggatagttaagcgtttgcgttttcgtgtgttttgcgtcgtgtttttgttttttttatttttttgattgtttgtattatatttttgttaggggttagtttgtttgttttatagataaggaaattgagttttgggaaagtttagtgatttgtttagtggattatagtgaattaagatttgtttttagggttagtggggtgaggaatggagttataggataggagttcgtttttggttttatggatggagatggtattttattgttaattttttttttttttcgttttttaagtttatagtttttttttttatcggtttgggttttcgtttatgatattttttttcgttattattttattttttttttaatgagagaagaagggaaatataacgtttagaaaagagggagggagatttttttttttttttttttttaggttgtaaggcgtgttggtttgaggttgtttattttttttttgtcgttttaatttaatttttgttttattttttattttggtttttgtaataggttagatatgattttattttgtagttgttgatgggaaatagttttttgttgggaggtatgggtgggggaagaggatatcggggtgtagagttcggcggggattaggtagagtgtgtgttttttttttttattttatttagtattaagatgtcgtaagagggttaaatagaggtttggttgttatttttgtatgttttttgggattttttttggagtatgaagatttttaaggatttatttttttttttttttgatgttagagtagattaagttgttatattttagttttatgttgaagtttttagttttttaagtttagaagagtttttggaagagttatttttagtttatgtagtttttataagtgtgaagggagtgggttgggggtgttttttttgttattttcgaaaagaaaaaaattatttggtg

SEQ ID NO: 500 - DNA, 2378 bp, Artificial Sequence
  chemically treated genomic DNA (Homo sapiens)
tattaggtaattttttttttttcgaaaatggtaaggaaaatatttttaatttattttttttatatttgtgagagttgtatgagttgaaagtgatttttttaaaaatttttttaagtttgagaagttggagattttagtatgagattggagtgtgatagtttggtttgttttggtattagaagggagggaaagtgagtttttggaggtttttatattttaggagagattttaagagatatgtaagagtggtaattaggtttttgtttgatttttttgcggtattttggtgttaagtggggtgaagggagagaatatatattttgtttggttttcgtcgggttttgtatttcggtgttttttttttttatttatgttttttagtagaaaattgttttttattagtagttgtagaatgagattatgtttggtttgttgtaagaattagaatgaaggatggagtagaagttggattggggcggtaagaagggagtaagtagttttaggttagtacgttttatagtttggggaggagggaaaggagaggttttttttttttttttttgagcgttgtgttttttttttttttttattgggagagggatgggatgatggcgagagaaggtgttatagacgggaatttaagtcggtgggaaggagagttgtgggtttggggggcgggggagagggagaattggtaataggatgttatttttatttatagagttagggacggatttttgttttgtaattttattttttattttattagttttgggagtaaattttagtttattgtgatttattgagtaagttattaaatttttttaaggtttagtttttttatttgtgaaatagataggttgatttttaatagagatgtagtgtaggtagttagagaggtgagggaggtaaaggtacggcgtaaggtatacgggaacgtaggcgtttaattgtttatattacgcggcgtttttttaatttcggtttggcgcgtttatcggtttttagttattaggatttgttttagtaggcgcgcggtttgtatacgcgtttttaatttcggcgtttgtagtagtcgtaatagtaggtcgaggtcgttatcgaggcggatggcgtcgtatagattttgggttatttcgcggtttacggtcgtagtagttaggttttttttattagttggaagatttcggttaggtcggcgtttacggttcgcgcgtcgttcgtttgttttagcgcggataaggtttgttgtagtttcggtagcgcgcgttttagggcgttttgtatttcggtgtttgttttcggcgatattttcgcgggttcgggttattcgtagtttattatgggttcgtgttatcgtttttatttggtttaggtatcgttagtcgttcggcgtttcgtcgtgggttcgatatggcgaagaagcgatatagtttgtaggcggagagaagtagcgttaggattatgggcgcggggtcgcgggggatattttcggtttggaggcggggttacgcggagagattcgggttttgggaaaagagggattcgagaggggtcggggaaagaagatggagggggaggaatggagagaagggtattaggtaagggtgtcggttagaagtttgggggaggagtgtcggtaggatcgggggagcggttggtaaaggtgatgtaggtttagatgtagggagtgggcgaaaggagagagcgagtaggcgagggatggtttcggacgtcgtagggtagaggaggcggcggttggaataaagcgtggtttgggtacgggttcggttgagttgggagatgttcggtagtagttacgtttcggaggagtagcggttttcggtcgacgtttcgtttttgggtttcgcggggtttttttagttttttgtagttacgtttcggaggagtagtggttttcgggtcgacgtttcgtttttgggtttcgcggggtttttttagttttttgcgtagttttatttttaagtcgtttttagttacgtttacgtttttggttagttttttttagttttttagttagtcgtagttatttttttttgcgttggatttggaggaagggggtggagaatgagaggacgtttttcgtttttcgtttcgttttttcgttttacgtgatatcggtacgtgggagtaatatcgttggatgttttttttttattaaatggttaaaataattattataatttttaaggtttttttatggttgttttttagcgaaattttataatatgtttatggggtgggaattgatgttttattttatagttgattttattgaagtttatgaggaagaaattggtttaaattatagttttttttgattatagaatagaaaaagttagttaaaattttaggat

SEQ ID NO: 501 - DNA, 2820 bp, Artificial Sequence
  chemically treated genomic DNA (Homo sapiens)
tttaggggataatatttaggtatgttaacggagtttaaaatgttaaggaaattatattataattttgtttagtatattataggttgttaaatcgaaatgttatgttagttaggagtgtagtaatttttattttttggttttatttaattaggaagttttagtagagcgaagtttgttaagcgttcgtcgttagaatttgaaggaattcgagcgagtaagaagagtgtttgatttattttatagaagtttgtttagaaatggaggagttagcgtttattgaagtcggtttcgttttcggttcgtttatatggagtttgattagttttagttatgtttatttcggtttgggagattcgtaaagtgtttttttttttaatttttttgtattattttgaagtttagggaagtaaagagaggggtatatttggattgtaaaattaatgttttttgtcgtttaggagagaagggaatgagagagagagagagatagatagatagagagagagagagagagagagagagagagagagagagagagagagaaattttattgaaatttagtttttttagaatttgtgtgatttggtttttaacgggagattagtgcgattttatggtatttttgttaggaattagcgatttttttgtagttattatttgatttattgttttttcgtttatttttttttataaagttattttttttttattttagtaagatttttttttttaatgatgataaagtttttgttttagtgttttttttaggattggtgtttttttaaaatagtgaatttagaaaattatttcgtttaatattttttaaaattttcgtagttttaatgtaagcgtaagtatgtaaaggttttttgttatatttgtattttttgtttattttagaattattttttattttcgggtttgtaatagttttttttgtttttttggatagaggtgggtggtattaggggtttagggtagtaggaggtgaggggttgaggaggtcgttagggtaggttggtttgtgttggatacgcgtgtttttttgcggagttaaagggtcggggacgggggttttggatttattagagtaattttagtcggtgggcgtttggtagttatttaaggaggtagggaaagtagcgagttttatcgggcgggttacgatgagtagtatgacgggtagtagtagtagttagtaaaagttttcgtaaagtgtttagttgttgtattgtcgcggggatttttatagtattatgattagttcgtgtaattttgtagtagtaaacggttttcgaggaatataggatcgcgggggtcgggtagcgggttattgagtatttcgcggacggcggtagtagaggcggcggcggtggtagtggtattcggcggggaagtagtagttaaattcgcgtatgatttcgagagttttagtaatatttagggattgggtttagtttcggagcgagagggtcgttcgttgagaagttgcgtcggagacgcgggaagttgttgttataaggagggagttttgggaagtcggaggataggaggagacgggagtttaggggtagacgagtggagttcgaggaggtagggtggagggagagttaaggcgtttcgtagttcggtagtcgtttttcgagttttgtcgttcgtatttttttggcgtttgggaagtagtaggtttttagttcgttcggggttacgtgggaagaggtagtcgggttttgattggtggagtaggatgtaggtttcgggagggaggggtcgacgaggaggtgtaaggatgtaaggaggaggcggtcgcggaagttatagatgggttcgttcgttaggcgttggttcgagtggggttaggcggggatggtttaaatgagaagttcgggttttagggtgggttattcgtatatttatatattattcgttttatttttcgttttaggacgttttttatcgaaggcggggttcggattagcgtttttttttcgcgcgtgatttcgggtcgcgagtgcgggtcgcggttgggtggcgttttttcgagttggagatggtgggggcggaggtgttagaggagtagtagtagtagggtagagaggggcgagtcggcgcgggagagggcgttttgttggcgatcggcgttttagcgtgcgggagcgcgtcgtttaggttgtagggggatgtaggttgggaatgtcgcggcggagaggttagggacgtttttttagggatttataggaaagagggtgagaggcgatggtgttagaatcgtttttgtcgatttggaagtaatagtagtattttttataagagcgtgtaattttaaggttgttcgtcgaggtagtttagttatttcggtaggcgttttttttttttttttttttttttttttttttttttaggtttttcgtagtttcgatttagtttaagcgttcgtaggtttgaatttttttttttattattcgtttttttttagttcgtagtttattagtgtgtttatttgggaggtgcggttagatgtgtttggaaggttagattggtcgggataagtggtttgagagaaagagaaaggtttttttgtatacgtcgcgggtgggttgtcgggagtatcggtcgggtagcggcgttcgggaaggggagagcgggttttatttgttggtttaggtagtgattttgcgttttttattcgggtttttgtcggatggtcggtgatttggggcgacgagagaaggtttaattcggtaggagtttttggttttgcgcgttttttttattttttttagcgggaagggtaaacggtatagcgggattcgtttttcg

SEQ ID NO: 502 - DNA, 2820 bp, Artificial Sequence
  chemically treated genomic DNA (Homo sapiens)
cggaaggcgggtttcgttatgtcgtttgtttttttcgttggagagaatgaaagaaacgcgtagagttagagatttttgtcgagttagattttttttcgtcgttttaggttatcggttattcggtaaagattcgagtaaggaacgtagggttattgtttgggttaataaatggagttcgttttttttttttcggacgtcgttgttcggtcgatgttttcggtaatttattcgcggcgtatgtagaggagttttttttttttttttagattatttgtttcgattaatttgattttttaaatatatttgatcgtattttttaggtggatatattaataggttacgggttggagaggagcgggtgatgaggagagggatttaaatttgcgaacgtttgggttgggtcggagttgcggggggtttgggaggagagaggggagaagagagaaggaaggagagcgtttgtcgggatggttgagttgtttcggcgagtagttttggggttgtacgtttttgtgggagatgttgttgttgtttttaggtcggtaagagcggttttaatattatcgttttttatttttttttttgtaaatttttagagaaacgtttttggttttttcgtcgcgatatttttagtttgtatttttttatagtttaggcggcgcgttttcgtacgttggagcgtcggtcgttagtaggacgttttttttcgcgtcgattcgtttttttttgttttgttgttgttgtttttttgatattttcgtttttattatttttagttcggagagacgttatttagtcgcggttcgtattcgcggttcggggttacgcgcggaagaggggcgttagttcggatttcgttttcggtagggggcgttttggagcggagagtgaggcgaatggtatatgagtgtgcgggtagtttattttgaagttcgagttttttatttgagttattttcgtttagttttattcgggttagcgtttggcgagcgagtttatttgtggttttcgcggtcgttttttttttgtatttttgtattttttcgtcgatttttttttttcgggatttgtattttgttttattaattagagttcgattgtttttttttacgtgatttcgggcgggttgaggatttgttgttttttaaacgttagagggatgcgggcggtagagttcgagaggcggttgtcgggttgcggggcgttttgattttttttttattttgttttttcgggttttattcgtttgtttttggattttcgtttttttttgtttttcggttttttagagttttttttttatggtagtagtttttcgcgttttcggcgtagttttttagcggacgattttttcgtttcggggttgagtttagtttttggatgttgttgaaattttcgagattatgcgcgggtttggttgttgttttttcgtcgggtgttattgttatcgtcgtcgtttttgttgtcgtcgttcgcgggatgtttagtagttcgttgttcggttttcgcgattttgtgtttttcggaagtcgtttgttgttgtagagttgtacgaattagttatggtgttgtgggagttttcgcggtagtgtagtagttggatattttgcgagggtttttgttggttgttgttgttgttcgttatgttatttatcgtagttcgttcggtgaagttcgttgttttttttatttttttaagtgattgttaaacgtttatcggttggaattgttttggtaagtttagaattttcgttttcgattttttaatttcgtagaagaatacgcgtatttagtatagattagtttattttagcggtttttttagttttttattttttattgttttagatttttaatattatttatttttatttagagaaataaggggaattgttgtaggttcgggggtgaggggtggttttgggatgggtagaaagtgtaggtgtagtaggaaatttttgtatgtttgcgtttatattggagttgcgaggattttgagaaatattaaacgggatggttttttgggtttattgttttgaaagagtattaattttaggggaaatattgaaatagaagttttgttattattaaagaaaaaagttttattaggatgaggaagaaataattttatgagaaagaatgagcgagaaagtaataaattaaatggtgattgtaggggaatcgttgatttttggtaaaggtgttatgaggtcgtattggtttttcgttgaagattaggttatatagattttagaggagttgggttttaatagaatttttttttttttttttttttttttttttttttttttttttttttttttatttatttattttttttttttttttattttttttttttttaggcggtaaaagatattggttttgtagtttagatatgtttttttttttgtttttttaagttttaaggtagtataggggagttgagaaaaagaatattttgcgggttttttaggtcggagtgggtatgattgaggttggttaggttttatgtaggcgagtcgagggcggaatcgattttagtgggcgttgatttttttatttttggataggtttttgtggagtgggttaggtattttttttgttcgttcgggtttttttagattttgacggcgaacgtttggtaggtttcgttttgttgaagttttttaattaaatagggttagaggatgggagttgttgtatttttagttggtatagtatttcggtttgatagtttgtagtatattgggtagaattgtggtgtaatttttttggtattttaaatttcgttaatatgtttgggtattgttttttagg

SEQ ID NO: 503 - DNA, 2280 bp, Artificial Sequence
  chemically treated genomic DNA (Homo sapiens)
attagtatagaattgttattataggatcgtagtttaagtattagagtgatattaattggttatgtttaattgttttaaaattattttttaaataattatattgatattataatagaaattatgggtatttattttatatttagatggaaggtattattggatatgtattaaaaaaaagattttttgaaaaaaataaaataaaataaaatattattattaaaataaaagaatttaaaataatttttaaaaattttttttaataaaatatattgttaatttataaaatggattgatgattagttatgtaaatgttttaaataaaatttttatattttttttatagttaatttatgttttgaattgtttatcgattataaataatggcgaaatggtattttttgattatattgtattttgtttatagaaagtttgatacgatggaatttattaggtaagagggtgggtgttgtgaacgagatgtcgtttttagtcgcgggggcgggtagagtttttggagcgcgtggattttatgcgagttatgtagtattttttgttttttgttagaagttaaagttatttatttataatatatttatgttttcgtgtaattgtttatttttgcgtagttaatagggagttattacggggttaatttataggggaaaaatagatatttatttttttatatagatgtggatatatgtatatatgtatagaatcgcggtatttaattttataggtttcggggtcgagggcgagggtattgttagtttttttagtagggtcgtgttgggttttttgttaaaaggggtttttagtaaagagcgagttggttgcgtttttttagttttttatagtttgttttttgttttaaggagggagttaagtaaggggttaggttttttcggttgtgcgagtttatagttatttatttatttatgtttatttaggttgatggcgcggggatttgggtatacgtttttttagttttcggggtgtttgcggtggggaaggatgtatcgttttttttttgtttttttttattggggttggggttttagtttgagagcgagtgagagttatagttatatattttgtgggttttatttgcgttgtaaggtttattgtgttagtaggaagagttatagattgtttgtagggaattaatttcggacgcggaggagttggtatttcgttttttggatcgttttcggttttttaggataaatacgagtatgtttattacggtgaaggcggaggtgataaatattagtagtagtttcgggattaatatcgagatggatattttgttggtgtttaggtaggagttggagtgcgtttcggttttcgttaatttagtgttgtttttattgtgcgaagttaacgtgggcgagattttagcgtatagttgagggtagatttcgttattggagaggagtatgaaattttttttaaagaagtttatcggcgttttatatttgaggtcgtttattagtatttcggaatttaagcgttttgtttattgtttgaaaggtataattgtgtaggagtatttttaggggttttcgtggaggtttatttggatgatggaggttaattggtttagtatttttgttatcgggaggtatatgaagtaattgttgtgtaggttgagtttagagagcgagattttagcgaatacgtttataggtagggattttagtaggttgttgttgagaatgaggatttttagtttgggtatggtattgaaagtgttcgggaggatgagttggatagcgttgtattttacgtttaggtattttaggttttgtagtttcgcgaatttttttcgggatagcgtgtttaggtaattgttatttatgtatagttatttgaggtttaaaaggtttttgaaagtgttgttttttatagtagcgatgttattgttgtttagatttaatagaatgaggtttttgtaatttataaagtgcgattttcggatgttgtggattttgttatttcgtaggaaaagtttttgtacgttagagagtttgggttttaaattagttaagttgtttacgtttttgttgttgtagtttatttttaaattcgattttgggatgtggtcgtagttgtagtttttagggtagggtaaattgttagttaagggtttgtttttggagttattcgtcgttatcgttgttgtgggtttgattttgatttgttagttgtttgggatttttgtattttcgtttggagtagattttggtgtggtatgatttttttgtttatttgttttga

SEQ ID NO: 504 - DNA, 2280 bp, Artificial Sequence
  chemically treated genomic DNA (Homo sapiens)
ttaagataaatgggtaagaggattatgttatattagggtttgttttaaacggaggtataaagattttaggtaattggtagattaaaattagatttatagtagcgatagcgacgggtagttttaggaataaatttttagttaatagtttattttgttttgggggttgtagttgcgattatattttagggtcgggtttaaagatgaattgtaataataggaacgtgagtagtttggttgatttgaagtttaagttttttaacgtgtaggagttttttttacgagataataagatttatagtattcgaaaatcgtattttgtggattataagaattttattttgttggatttgggtaataataatatcgttattgtagagaataatatttttaagaattttttggattttaggtggttatatatggatagtaattatttggatacgttgtttcgggagaaattcgcggggttgtaaaatttagagtatttgaacgtggagtataacgttatttagtttattttttcgggtatttttaatgttatgtttaaattgaggatttttatttttaataataatttgttgaggtttttgtttgtggacgtgttcgttggggtttcgttttttaaatttagtttgtataataattattttatgtatttttcggtggtaggggtgttggattagttaatttttattatttagatagatttttacggaaatttttgggagtgtttttgtataattgtgttttttaagtagtgggtagaacgtttgggtttcgaagtgttgatgagcgattttaagtgtgagacgtcggtgaatttttttagaaaggattttatgtttttttttaatgacgagatttgtttttagttgtacgttaggatttcgtttacgttaatttcgtatagtaaaaatagtattgggttggcggagatcgggacgtattttaatttttatttagatattagtagggtgtttatttcggtgttggtttcgggattgttgttggtgtttgttattttcgtttttatcgtggtgggtatgttcgtgtttattttgaggaatcgaaagcggtttaagagacgagatgttaattttttcgcgttcgagattaattttttatagatagtttgtgattttttttattggtataatgggttttataacgtagatggggtttatagagtgtatgattgtggtttttattcgtttttagattaagattttaattttaataggggagggtagagggaaggcgatatatttttttttatcgtaggtatttcgggggttggaggggcgtgtatttaaattttcgcgttattagtttggatgggtataagtagataaataattgtgagttcgtataatcgaaagggtttgattttttatttagttttttttttgaaataaagagtagattgtggagagttgggagagcgtagttagttcgttttttgttgagagttttttttgatagaaagtttagtacgattttgttggaagaattgatagtgttttcgttttcggtttcggggtttgtggggttggatgtcgcggttttatatatatatatatatatttatatttatatagagagatagatatttattttttttttgtggattagtttcgtgatggttttttgttggttacgtagggatgggtagttgtacgaaggtatgaatgtattgtaaataagtaattttgatttttgataaaaaataaaaagtgttgtatggttcgtatggaatttacgcgttttagggattttgttcgttttcgcgattggagacggtatttcgtttatagtatttatttttttatttgataagttttatcgtattaaattttttataaataaaatatagtataattagaaagtgttatttcgttattatttgtgatcggtaggtagtttagagtataagttaattgtgaaaaaaatgtaaaggttttatttaggatatttgtatggttagttattagtttattttatgagttaataatgtattttgttgagggaagtttttaggggttgttttgggtttttttattttgatggtgatgttttattttattttattttttttagggggttttttttttaatatatatttaataatgttttttatttgaatgtaaaataagtatttatgatttttattatagtattagtgtaattatttaaaaaatgattttgaggtagttaagtatgattaattaatgttattttagtgtttaggttgcgattttatggtagtaattttgtgttggt

SEQ ID NO: 505 - DNA, 5907 bp, Artificial Sequence
  chemically treated genomic DNA (Homo sapiens)
gtcgtcggagtagggttttagcgtatcgcgagtttttgtttttttcgttttgtagcgtcgcgagtttttttttttttcgcgtttggtttcgtttgcgtttttttcggcgtgggtattcgtagattcgttaggaggttgacgagaggtgtttttatagagttttgtttttttttagatttttaaacgaaaagaaagagaaaagttaatttttcgtttttattttgtacgtatttggagagcggttggtggcgagcgattcgtataatcgtttttttcgcggcgtttttggacgggcggagagaattcgggtgattgagtttgaggttgagtttttttgggagcgatttatgttagttatttttatttttaagggggattcgcggtcgggtttacgcgcgaaggatgggtgttagggaaattgatttatagacgattcgtttcgcgagagattgataatttagttttgcgggttttcggggcgtttagattagtttttagttagaggatttggggttgtatagttttcggattttggagggggtggttcgggggtgggagattgcgagtattagtttacgtcggtttttttttattttgcggcggcgaggtgggaagggttaggatgcgagtttagtattttttttagaaatgtagtatttcgtttttttattttttttgttttcggcgtttttttttttacgcgttttttttcgttttttttttaagggcgttttttttttgtttttagtttacgtttgaatttttcggcgttttttttttttttttttagttttttttttacgttttttgttttcgggtattttttttttttaattttttattttcgtatcgtttgatttcgaggggcgggagcgtattgggttgcgtacgggtgggggcgtcgcgttagtttcgcgtagttgttttgacgtcgttgtcgtcgtcgtcgtcgtcgtcgtttttcgtagtttagttcgcgtttcgcggtagtttcgtagtgtattagttattatcgtcgtcgtcgtcgtttcgttagatttgttgttagtttgttcggtttagttttgagagagtttcgaacgttagttgcgagggttatgagttagagagtttcggggcgtcgcgcggagagtaagcggagatagcgattttgcgttttttagttttcgtttttttgtatcgcgtttttcgtattttcgggtttttttgtttttttcgttgtttttatcgtcgttatggttattttgtttcgtagtaagttgtttaacgtggttacgttcgtgtttaataagttttaggttaagatgagcggtatgttcgttaggatgggtttttaggcggttacggatgaggaggcggtgggtttcgcgtattgcgacgatttcgattttgagtatcgttagggtttgtagatggatattttgaaagtcgagggagagttttgcggggacgagggcgttgaagcgttcgtcgagggagatatttattattagcgaggtagcggagtttttttgtcgtttttcggttttaaggattaggtgggaggtggtggcgaattcgggggttacgataagtttaaaattacggcgtgggaggtaggttggaacgtgattaacgttatttaggtaagcgcgggatttttagttttgtttgttttttttttttttagtttagcgtgtcgggttttgttttcgatagtcgttcggtgatttcggtttggagatttttttttgtatttaggaatttttttttttttattttttttagttttgcgcggggatttacgtttttaggcggtgtttttcgttttaatttacgtttttttttaacggtattagttgtaagatcgttaggttgaagttcggtttgagatatttgttcggagatattgtaaaagtgaaggaaatggggggagggagtaggaagcgatgagaaagaaagaaaattaggattggagggtacggtttggttttggattttggaacggatttatagttgtatttttgggaggaaagaagaaggggaaatcgttgaggtcggagtttttttttttcgtatatacgtatagatacgtatacgtatataggtaggtatattatatgtttatagtttttttttttacgaataaaggcgtaggtataggcgtatacgatatgtatttatatatagattatagtattatttttaaatgtatttgcgtatatttttatagttttataaataaaagtatatatttgtatatattaaatatacgaatattcgtttgaatatatgtatatatatatgtatagatgtatgtagataggaattagtttgtttttttgggtgcggttttgttggagatatataggtatatatatacgaaagtatatatatgtttttatataaatatatttagttcgtaataatttagtattatttgtgtatagattcgtttttttcgttcgaaatttcggttgtatcgtaaagaggcggttagttttttttcgtgtgattttggcgaagttttttttagaggttaagaatggtttttgttttttaggttttttttttttatttttaattttttattttttattaggcggcgtaggatttttatatagggagtaggtttggagttttggtaacgattttcgagttagtaggggttggtaggtcgtagttttttgggtcgaaggagattttagttttaggtaatttcggttttttatagtttggtttcgcggcgtttttggagcgtattattattggggttacggaaggtaggttttttgggagtagaggttttttaggggttgttttatgtatcggggtaagtaggattttatcgggtttcgaatattagatggttcgatttaaggcgtttttcgtttcggggttcggcgagacggttttgttggattacggattcggggttgttttcgttttcgttgtgtttcgcgatttttcggggcgttttttaaggtttcgtttgataggttttaagggaggttagggtaggaggttggaggttcgtaggttttcgggattttggatttcgttagtttttagttttcgtgtggattttaaattttatagttttgttcgtttgattttgaagtttttggttttagatttttgttcggttcggttttttggtttttttggcgttttttcgttaagtttttttttttgtttgtttttttagtttttatttagtttttttttttaggtttcgttttcgttttattttaattttagttttgttttaagatttttaatttttagttttgttttttttttttcgcgcgttgttttttaagcgtttttatattgtttttgtttttgttttttaggggttttgttttatttttagtttttttttttttttattttatttttttttcgttttataattgtagtttttaacgtttttttttttggtttgagtttgagacgttcgagtttttttttttagttttcgtgttttattttagttttattataaatttcgtgtttattttttttattggtttaggtttagtttattattttttttagagttttttttcgattacgtttttttttgtttttttttatttttttttttaattttttattttgtttttgtttttagaaattatttcgaagtatttttttttttttttgtggtttttttttatttttagtttttttttattttagttttttcgttattattagttattagcgtattttttttttttagattcgtttatatatttttttttttttatttttggttcgatattcgggtttattattagtttttttatatttatttcgtagtttgtttttaatttttttttttcggcggtttagatttaatttttagtgtttttagcgtttttttcgggttatagcgttaagttacgtttttcgggttttttattcgttgttaagttcgttgagcgttcgcgtttggttgttttttcgttttatagggtatgttcgtgttgggtttattttacgttattttgtacggcggttatttggggttgttttttattattttcgtcgtcgttgtgtgttgttatatcggtaagatttttatcgcgtgtttgtacgaggagaatgaagacggcgaggtggtgcgcgtgcgggattcgtacgtggttatagttaacgtttgttgcgtttcgcgttttttaacgttgggcggtcgagtggtgaacgtagcgtagattatcgagttggtgatgacgtgtattttgtacgtggtggtgagtggtaattttatgtataatagtttttcggggttgttcgtgtcgtagaagttttggtttattatcgttacggtcgtgttgttgttttgcgttttttttaagaattttaaggtcgtgtttaagtttagtttgttgtgtattttggtttatttcgttattaatattttggttatagtttattgtttatcgcgggcgcgcgattgggtttgggagaaggttaagttttatatcgacgttaagaagttttttatttttattggtattatcgtgtttagttatacgttttagatttttttgttttcgttggagggtaatatgtagtagtttagcgagttttattgtatgatgaattggacgtatatcgtagtttgcgtgtttaagggttttttcgcgttcgtcgtttattttatttgggtcgacgagattaaggaggttattacggataatttgttcggttttattcgcgtcgtggttaatatttttttggtggttaaggcgttgttgttttattttttgttattttttgtcgttgtcgaggtgttggagaagtcgtttttttaggaaggtagtcgcgtttttttttcggtttgttatagcggcgacgggcgtttgaagttttgggggttgacgttgcgttgcgcgttcgtcgtttttacgttgtttatggttatttatgtgtcgtatttcgcgttgtttatgggttttatcggtagttttacgggcgtcggtttttgttttttgttgtttagttttttttatttgcgtttgttttggcgtaagttgttgtggtattaagtttttttcgacgtcgttattttcgttatcggcggtatttgtagcgtgttcggtttcgtgtattttttcgagggttttatcgaagtttatcgaattaacgcggaggattagggcgtaagggcgagttttcgtcgcgtttttgcgtttttttttttttttttttatttcgtttttattagtttagtgcgttttgtcgtcgcgttgggaggttaagttttaaatatttttggtttttagtttttgattattcggggatgggggggatgggaggggatagggatttacgatttatcgcgtttgcgtttttgttgtttttttttttttataatattttggttttggggggaggcggggtgtatttgcgggtagggttttttgtttttttaagtggggtttcgatattttggttttagttatcgagggggttgggaagggagggagagggggcgtagttcgtaggcgtggtaatttgattttgggggaatattttatatttatttagagttcggaatttatagcgtttagttatttttagtaagagcgttttttatttcggagacgttttaattttgtagcgggaaaggttgattgggaaatttattttgggtgggtaattttttttaacgaagtcggaaggcgagaagtcgcggcggggttagtttgtttgtcggtttttaggaatttaaatttttattttgtgtaatttattaggtgtggaattgttttattgtgcgtgtggtgtgttcgtggtgaataagatgaaatgtatattagaaaaaaatttatttttaatttagagtgcggtatataattatattcgtaaataaagaagagataaaggtttgcgcggttcggtgtcgggtttgtg

SEQ ID NO: 506 - DNA, 5907 bp, Artificial Sequence
  chemically treated genomic DNA (Homo sapiens)
tataaattcgatatcgggtcgcgtaagtttttgttttttttttatttgcggatataattatgtatcgtattttaaattagagatagatttttttttgatatatattttattttatttattacgagtatattatacgtatagtagaatagttttatatttgataaattgtataagatgagagtttagatttttgaaaatcggtaggtaagttggtttcgtcgcggtttttcgtttttcggtttcgttgaaggaaattgtttatttaaaatggattttttagttagtttttttcgttgtagggttgaaacgttttcggaatgggaagcgtttttgttggaaatggttggacgttgtagatttcgagttttggatggatgtgaaatatttttttaaggttaagttgttacgtttgcgagttgcgttttttttttttttttttttaattttttcgatgattggaattaaagtgtcggggttttatttggaaggatagagaattttgttcgtaaatgtatttcgtttttttttaaaattagggtgttgtggaaaagaaaggataatagaaacgtagacgcgatggatcgtgaatttttgtttttttttattttttttattttcgaataattagaaattaggaattagagatgtttaaagtttggttttttaacgcggcggtagggcgtattgggttggtgggggcggggtgaggggagaagggagagagcgtagaagcgcggcgggggttcgtttttgcgttttagtttttcgcgttggttcggtaggtttcgatgaggttttcgagggagtgtacgaagtcggatacgttgtagatgtcgtcgatgacgaagatggcgacgtcgaagaagatttggtgttatagtagtttgcgttagagtaggcgtaggtgaaagaggttgggtagtaagaaatagaggtcggcgttcgtgaggttgtcggtgaggtttatgagtagcgcgaagtgcggtatataaatggttatgagtagcgtgaagacgacgagcgcgtagcgtagcgttagtttttaggattttaggcgttcgtcgtcgttgtagtaggtcgggaaaaaggcgcggttgtttttttggaagagcgatttttttagtatttcgatagcggtaaagaatggtagaggataggataatagcgttttggttattagaaagatgttgattacggcgcggatggagtcgggtaggttattcgtgatgatttttttggtttcgtcggtttaggtgaggtaggcgacgagcgcgaagaggtttttgagtacgtaggttgcgatgtgcgtttagtttattatgtagtggaattcgttgggttgttgtatattgttttttagcgaaggtaggaagatttgagacgtgtagttgaatacgatgatgttaatggagatggggaattttttgacgtcgatgtagaatttgatttttttttaggtttagtcgcgcgttcgcgatagatagtaggttatgattaggatattgatgacgaagtgggttagagtgtatagtagattgaatttggatacggttttgaggtttttaaggaaggcgtaaggtagtagtacggtcgtggcgataatggattaggatttttgcgatacgggtagtttcgggaagttgttgtatatgaggttgttatttattattacgtataggatgtacgttattattagttcgatgatttgcgttacgtttattattcggtcgtttagcgttgggaagcgcggggcgtagtaggcgttggttatggttacgtacgagtttcgtacgcgtattatttcgtcgtttttatttttttcgtataggtacgcgatgaggattttgtcggtgtagtagtatataacggcggcgaagatgatgagaaataattttaggtagtcgtcgtgtaggatggcgtagggtaggtttagtacgaatatgttttgtggggcggagaggtaattagacgcggacgtttagcgaatttggtaacggatgaggggttcggggggcgtggtttaacgttgtggttcgaagggggcgttaaggatattgagaattgggtttgagtcgtcggggaggagaggttaagagtaggttgcggggtggatgtaggggaattaatagtgagttcgggtgtcgagttagagatggagagggagggatgtatggacggatttgagaaggaaaggtgcgttaatggttggtgatagcgagagggttagggtgggagagggttgagaatagggagaagttataggagggaagggagatatttcgggatggtttttggggataggaatagaatgaggagttgggggaggagatgagaagggatagaagggagcgtagtcggaaaggggttttaagaaaggtagtgagttgggtttgggttagtggaaagagtgggtacgggatttgtggtggggttggaatggggtacgggagttaaagaggaaaattcgggcgttttaggtttagattagaggaggaaacgttaaaggttgtagttgtgaggcgaaaaggaaatagggtagagagggagaggggttgaaggtggggtaaagtttttgggaggtaagaatagagataatgtgaagacgtttggggagtagcgcgcggggaggaggaagtagggttggaaattgagagttttaggataaggttggagttagagtgaggcgagggcgagatttaaggaaggggattaagtggaggttggggaggtaagtaggaggaggagtttggcgggaaggcgttagggaggttagaaagtcgaatcgagtaagagtttagaattagaagttttagggttaggcggatagggttgtagggtttagaatttatacggggattaagagttaacgaaatttagggtttcggaggtttacgagtttttagttttttgttttggttttttttggggtttattaaacggagttttgaaagacgtttcgggaagtcgcggggtatagcgaaggcgggagtagtttcgggttcgtgatttagtaaggtcgtttcgtcgggtttcggagcggaaagcgttttgggtcgggttatttggtgttcggggttcggtggagttttgtttatttcgatatatggaataatttttgggaggtttttgtttttagaaaatttgtttttcgtggttttagtgatagtgcgttttagggacgtcgcggggttaagttgtaagggatcggggttgtttagagttgaagtttttttcggtttagaaagttgcggtttgttagtttttgttagttcggaggtcgttgttaagattttaaatttgttttttatgtaggagttttgcgtcgtttggtggggagtggggggttaggaataaggggagagggtttagagagtaggggttatttttagtttttggagagggtttcgttagggttatacggggaggagttggtcgtttttttgcggtgtagtcgggatttcgggcgagaggggcgagtttgtgtataggtaatgttggattattgcggattaaatgtgtttgtgtgggagtatgtgtgtgttttcgtgtgtgtatatttgtatgtttttaatagggtcgtatttaagggagtaggttggtttttgtttgtatgtatttgtgtatgtgtgtgtgtatatgtttaaacgaatattcgtgtgtttggtatgtgtaggtatatgtttttgtttgtggagttgtaggggtgtacgtaggtgtatttggggatagtattgtggtttatatatagatatatgtcgtgtgcgtttgtgtttgcgtttttgttcgtgggaaggggggttgtgggtatgtggtgtgtttgtttatatacgtgtgcgtgtttatgcgtgtgtgcggggggaggagatttcgattttagcgattttttttttttttttttttttaaaaatgtagttgtgaattcgttttagagtttaagattaaatcgtgttttttaattttgatttttttttttttttatcgttttttgttttttttttttattttttttatttttgtagtgttttcggataggtgttttagatcgaattttagtttagcggttttgtagttggtgtcgttgggagggagcgtgggttagggcggaaaatatcgtttgggggcgtaggttttcgcgtagggttgggagggatggagaaagggagatttttgggtataggagggggtttttaggtcgagattatcgggcgattgtcgggggtagagttcggtacgttgagttgggaggggggaggataggtagaattgggaatttcgcgtttatttggatggcgttggttacgttttagtttgttttttacgtcgtgattttgggtttgtcgtggttttcgaattcgttattattttttatttggtttttggagtcggagggcggtagaggagtttcgttgtttcgttgataatggatgtttttttcgacgggcgttttagcgttttcgttttcgtagggttttttttcggtttttaggatgtttatttgtaggttttggcggtgtttaaagtcgaggtcgtcgtaatgcgcgaagtttatcgtttttttattcgtggtcgtttgaaaatttattttggcgaatatgtcgtttattttggtttgggatttgttggatacggacgtggttacgttggatagtttgttgcggagtaaggtggttatggcggcggtggggatagcggaaaggatagaaggattcgaggatgcggggaacgcgatgtaagaaggcgagggttggggggcgtaaagtcgttattttcgtttgtttttcgcgcggcgtttcggggttttttggtttatgattttcgtagttggcgttcgaggtttttttagggttggatcgggtaagttggtagtaggtttggcggagcggcggcggcggcggtggtggttagtgtattgcggagttgtcgcggggcgcgagttgggttgcggagggcggcggcggcggcggcggcggtagcggcgttagagtagttacgcgaagttggcgcggcgtttttattcgtgcgtagtttaatgcgttttcgtttttcggaattaggcggtgcgggggtgggggattggagagaggaaatattcggaggtaggggacgtgaggaaggggttaggagaagagaaagggggcgtcgagggatttagacgtgagttgggggtagaagaagggcgtttttgggaaggaggcgggagggagcgcgtgaaagagggagcgtcgagggtaggggaggtgggggggcgaagtgttgtatttttaggggaggtgttaagttcgtattttggttttttttatttcgtcgtcgtagggtgggagggggtcggcgtgggttgatgttcgtagttttttattttcggattattttttttagggttcgggagttgtgtagttttagattttttggttaaggattggtttgggcgtttcgaaagttcgtaggattgagttgttagtttttcgcggagcgggtcgtttataagttagtttttttggtatttatttttcgcgcgtaaattcggtcgcgagttttttttgaaggtagaagtggttggtatggatcgtttttaaggaagtttagttttaggtttagttattcgggtttttttcgttcgtttagggacgtcgcgagggaagcgattgtgcggatcgttcgttattagtcgttttttaaatgcgtgtagaatggaggcgaaaggttggttttttttttttttttcgtttgggggtttggaagaaggtaggattttatgaggatatttttcgttagttttttagcgggtttgcgaatgtttacgtcgagaggggcgtagacggggttaggcgcggaggaaagaagggttcgcggcgttgtaaggcggaggaagtagaggttcgcggtgcgttggggttttgtttcgacggt

SEQ ID NO: 507 - DNA, 2315 bp, Artificial Sequence
  chemically treated genomic DNA (Homo sapiens)
ttgtatttggcgtgaggttttttggttacggacgttgttggcgttatatttgtggtatttgaggtgaattgtttagatggaaacggtattattaggtaattggtaatagaagtttaaagttttgggtgttttaggttagaggaaggaaggaatgtaagggtttcgttttttttaatgttaggagcgtgtgtttatagttttagataggataatttattgtaaatttaaagtagaaaatatggtttaattttatttttgtggtatttttatagatggtgtttatttgttttggtagtgatgatcgatattgcgaacgttgtgttggtagtgtgtttaagggttttaattgaattatttcgatggagttgaaatttagttttattttatagaagagaaaattgaggtttagagagattaggtgttaagttttatgttaagtatagggaagtaaaaataggatatatttaatataaggtggttttaggaattagtggttaggatacgggaggtgtgttgagcgtagatgggtagatgtaagttgaggtggtttgttggagggttttggattttttagaaaagaggatattagttgtttagggagggaaggtttgagatggattttggttggtgtggattagtttatggtgtgtttgtaggtagggatattttgaatagatatgggttgaggggagtttgtgtggagcgtggttagtgaaggttgggttggtcggtagggttcgttggttatgggaggtttggtttgtagtagtagggtttattaaagatatggggatggatggttgatggataagatggttgatggatagcgttttagaaggtcgtaggtttgtttaggttgaggttagggagggttagggtttttagggaaggagagtaagttaggggagttttttgtatagaagattttttatttgaggtcgttttttaggagtttagttatttcgtggagagtttggcgttgattgtggaagaggtgatggacgtgcgtcgtgtgttggtgaaggtcgagatggaaaagtttttgtagaataaggagttttttagtagtttgaagaaggggaaggtgaggttgtttagacgtggggttacgtttttgttcgttgggttaggggcgggtgtcgagagggttagtttttaggattgtttgtttatgatttggttgggagttttgagggggtagtagggatagggcgggattttagggagttttggataaagcggggttttaattagttttttttgatagatttgttgttgttgtcgggttaagttttcgttgttttcgtggtcgtttagttgttttttttgtaagaggtgagttttttttttagttgttagtttataagggaaggaggaggcgagaaatttcggggtagtatcgtttatagaattttttgtgattttaggaatgttttagtatgttcgatggttgatgagtttataagatatggttagtacgaatgaggagttaaattttaaattgtatttaaattaaattaaatttaaatagttaagtaatttttagttttagttaagatggggtaataggtattttttatagttaagaataaataggatgtgaaataatggtttttaagatagtaggtaataaaaaggaaatataacggggtaagtttgttattattatagttattgtttggagagtttttaggttatgagttatagttgtcggattttttagatggaggaggttaggttgagaatttagggagattatagtagttcgagttcgtcgtgtagaattttagaggagagggttgcgtcgagaaagttttagagaaggtttttttttttgaaggaaatgattgaaggttgtagaatatttattttaaagtagagattggtagattatagttacgggttaaatttggttttcggtttgttttgtaagtaaaattttattggatatagttatatttatttattattcgtttagttacgtttaaaaggtttattttttggttttttatataaaaaatttatttttttttgttttaaagatttgaagggacggtgtttaggggtaggaatgagtaatatcggtttttatcggttataggtagaaatgttataatttatagggtattaattggaatgtatataaaggattcgttttattaacgtggagtaagtagtttaaagtgattgttgttttaggtttgattgatatattataaaagtaagatttgaaaggattaaattgtttataagtattttaattgattttgagaataaagtttaagaataagaattttttaaatattaataaaaaa

SEQ ID NO: 508 - DNA, 2315 bp, Artificial Sequence
  chemically treated genomic DNA (Homo sapiens)
ttttttgttgatgtttaaaaaatttttatttttgagttttgtttttagaattagttaagatatttgtgaatagtttgatttttttaggttttgtttttatgatgtattagttaggtttagagtaataattattttgggttatttattttacgttagtgaggcgagttttttgtgtgtattttagttagtgttttgtgaattatgatatttttgtttgtggtcggtggaaatcgatgttatttatttttgtttttgagtatcgtttttttagatttttagaataagggaaggtaaattttttgtgtaaagggttagagaataaattttttaggcgtggttgagcgagtaataaatgggtgtggttgtgtttagtgagattttatttgtaaaataggtcgaggattagatttggttcgtggttatagtttgttaatttttgttttaggataaatgttttgtagtttttagttattttttttagagagggggattttttttgaggttttttcggcgtagtttttttttttggagttttatacggcggattcgagttgttgtggtttttttggatttttagtttgattttttttatttggggagttcggtagttgtggtttatgatttagaaattttttaggtaatgattgtggtgatggtaggtttgtttcgttgtgttttttttttgttgtttgttgttttgaaaattattgttttatattttgtttgtttttggttgtggaagatgtttattattttattttggttgaaattgggagttgtttagttatttaaatttaatttaatttaaatataatttaaaatttaattttttattcgtattaattatattttgtggatttattagttatcgaatatgttagaatatttttggaattataggaagttttgtgggcggtattgtttcgaggtttttcgtttttttttttttttgtgaattgatagttaaagggaaggtttattttttgtagaagagatagttgggcggttacgagaatagcgggaatttggttcggtagtagtagtaaatttgttaggagagattggttagagtttcgttttgtttaaagttttttggggtttcgttttgtttttgttatttttttagggtttttaattagattatgagtaaatagttttgggaattggttttttcggtattcgtttttgatttagcgggtaagagcgtagttttacgtttaggtagttttattttttttttttttagattgttgaagagttttttgttttgtaaaaatttttttatttcggtttttattagtatacggcgtacgtttattattttttttatagttagcgttaggttttttacggggtggttgaatttttaggggacggttttaggtaggaagttttttatgtaggaggtttttttagtttattttttttttttgaggattttaattttttttggttttagtttaaataagtttgcgattttttaaaacgttgtttattagttattttgtttattagttatttatttttatgtttttgatgggttttgttgttgtaggttaggttttttatgattagcggattttgtcggttagtttagtttttattggttacgttttatataaattttttttagtttatgtttgtttaaggtgtttttgtttgtaaatatattatgggttgatttatattagttagaatttattttaaattttttttttttgagtagttgatgtttttttttttggaaggtttaggattttttaataggttattttagtttgtatttgtttatttgcgtttagtatatttttcgtgttttggttattgatttttggggttattttatgttgagtgtgttttgtttttgtttttttgtgtttggtatagaatttgatatttgatttttttaagttttagtttttttttttgtaaaatggggttggattttagttttatcgagatgatttagttaaagtttttaaatatattgttagtatagcgttcgtagtgtcggttattattgttaaggtaggtgggtattatttatgaaggtgttatagagatggagttggattatgttttttgttttggatttgtagtgggttgttttgtttaaagttgtgaatatacgtttttggtattggggggagcggggtttttgtatttttttttttttttgatttgaggtatttagggttttaggtttttgttgttagttgtttgatggtgtcgtttttatttgaataatttattttaggtgttataggtgtgacgttaataacgttcgtggttaggagattttacgttaggtatag

SEQ ID NO: 509 - DNA, 2696 bp, Artificial Sequence
  chemically treated genomic DNA (Homo sapiens)
aagtttatgtagatttatttttagtagtttatatgataaataaatattgcgtttgatttttaaatattaaattatagtatattatagatagatatagagttattatttaaagtatgatattttaattttaaaaggttttttttgaagaatattataaattttttttttttttaagatttgttgggtaggaaagatgggagaaaatgaattaatgtttatatagaaaggaggataatgggggtaaaaataatagatgaacgtatgggtggatgagagaatggataaaatgataggtggatatgttgattttggatagatgggaaatgagtggatatattaataaatagatatgtgggtggatgggtggagaagaggatggtggatggttgtggttttatgaagagatgtgaaaaaggaagtgtggaatgatggatgagaagttgtatgggaagatgaatagaagaataggtggttgaataaattaaaaggtgtgtggttggatgaatgaatgagtgggatgatagatggatttaagtggttagtggatggataggaggatggatggatgtgagagttttagaaggatataaggaaagatgggtggatagatggatgggcggatggaaggatatttaggaggatgaatgagtatgtgtgtggagagaggtgtttatttatattggtttgaatatatgggttagttgagttaaatgttagttttatgataggttattagtagttttttttgagttgttttgttaagaagttaaaatttatttaagttatgtggatttgttattgaggggaaaaagaatgagttttttttttttttatttggaagatttattaattttttattttttattttttattgtgggtacggaggtattgcgttatttagggtaagatttcgttttttttttagttttttttttaggatatttaatattttgtgaaatttagagattttgttttagtcggatttagagaaatttagcgggaaaggagaggttaaaggttgaatttaatggtgtaaggttttacggttcggttattttttgttttgacgtcgcggggttagcgggagaagaaagttagtgcgtttttgggcgtaggggttagtggggttcggaggtataggtatttcgcgatattttaggtttttcgatttacgtttttggtagtttcgattatttatagttttagtagagtacggggcgggggtagaggggttcgttcgggagggttgttattttttaaaatttttgcgggttgtttagttatagttttttttgtttgggtgtgtttttcgttcgtttttttttttcgttttaggttattgtttttaatttcgaataaaaattgtagttaattttcgaggtagttttattgtttagcggattttagtttttgttaggttcggttcgttattttcgtttcgtttttcgtcggtttttgtttcgcgtttagggattttttagtttttttcgttcgcgtttttcgttcgtttcggatattatggataagttttggtggtacgtagtttggggattttgtttcgtgtcgttgagtttggcgtagatcggtgagtgttcgtcgtagtttgggtagtaagatgggtgcggggtgtttagcgcggattcggcggtagttttttcggttgagtcggttttgggggattggagttaagtgagttgtttgcgaagtgtattgggtttcggaaagtagggttgggatttgcgttaaatcgttggagaatgtgtttgtggaagtattatttggttgaaagaaaaagagaaagagaagaaagtttgttgggtaggttgtcggcgcgtagttttgggcgaggtcgttagagttgtagtatatggtagaaagtaatcgttttttcggatgcgtatagtcgttgtttggattaataggtttttgtgtttaagggttcgttaagttttatcgggttgtgtttaggtagggtagagttgggcggggtagagattggggttggaatagggcgagtggttgttattaaggtggttatagaagggattataattttaagtgtgagattagttggtaatgggttttttagaaaggggttttgggtttttttagttttttattgagttttgttttaaagtttatagttcgtagtgttattgttattttagcgttgtggaagtttgaattagttttgcggtgaggttttgggtttttatgagattttagtttgggatagggagtatgaatatgagaggtaattattggattagttgtttggtttttattattttttgtttttgttaattagtgtggggaaattttaatagtaaggtggtttatattttttgtttggtagttttagagtagagagaagagttttgatattagggtaatattagggattttggagttagggttttaatattttatttaaatagggttagtgttttgtggtggttatggaggggaggggttgcgtgtaaggtatattttagtacggtttaattttaagtattttttttttttgtttatgtatgtatagataattatatggtcgatttgtttatcgttggttaaaattaattttttttttaagaagtgttagttgggttattaagatagtttagtttgtatgtagtaaattttatttagtaaatatttattaatttagttttacgggagtattgagaaattga

SEQ ID NO: 510 - DNA, 2696 bp, Artificial Sequence
  chemically treated genomic DNA (Homo sapiens)
ttaattttttagtattttcgtggaattgggttaataaatatttgttgagtagaatttattgtatgtaggttgagttgttttaatgatttagttggtattttttaaaagaaagattaattttggttagcgataagtaaatcggttatgtaattatttgtatatatatagataaagaaagagaatgtttggagttgagtcgtgttagaatatattttatacgtagttttttttttttatagttattataaagtattgattttgtttggatgagatattggagttttagttttagggtttttgatgttgttttggtattaaggtttttttttttgttttgaggttgttaggtagggaatataagttattttattgttgagatttttttatattgattggtagaagtaggaggtggtgaggattaagtagttggtttagtggttgttttttatatttatgttttttattttaggttggaattttatggagatttaagattttatcgtagagttggtttaagtttttatagcgttaaggtggtagtgatattgcggattgtaagttttggaataaggtttagtggggagttgggagaatttaggatttttttttggaaaatttattgttagttagttttatatttggaattgtgattttttttgtgattattttgataatagttattcgttttgttttagttttagtttttgtttcgtttagttttgttttgtttagatatagttcggtggggtttggcgagtttttgggtataggagtttgttagtttagataacgattgtgcgtattcgggagaacggttattttttgttatgtgttgtagttttagcgatttcgtttaaaattgcgcgtcggtagtttgtttaataaattttttttttttttttttttttttttaattaaatggtgtttttatagatatattttttaacggtttagcgtaaattttagttttgtttttcggagtttaatgtatttcgtagatagtttatttgattttagttttttagggtcgatttagtcggaggggttgtcgtcgggttcgcgttgagtatttcgtatttattttgttgtttaggttgcggcgggtatttatcgatttgcgttaggtttagcggtacgaggtagagtttttaggttgcgtgttattaaaatttgtttatggtgttcggagcgaacggagggcgcgggcgaaaggagttggaggatttttgggcgcggggtaggggtcggcggaggacgggacgaggatggcggatcgaatttggtagaggttggggttcgttgggtaatgaggttgtttcggaagttggttgtagtttttattcgaggttgaaaatagtgatttaagacggagggagggagcgagcgaaggatatatttaagtaaggggggttgtgattaagtagttcgtagaggttttaagaagtagtagttttttcgggcgggtttttttgttttcgtttcgtgttttgttgaggttgtaaataatcggggttgttagggacgtgggtcggggaatttggagtgtcgcggggtgtttgtgttttcgagttttattggtttttgcgtttagagacgtattggtttttttttttcgttggtttcgcggcgttaggatagaggatgatcgaatcgtaaaattttgtattattgggtttagtttttggttttttttttttcgttaaatttttttgaattcggttggagtaagatttttgggttttataggatgttggatattttgggagaggagttggagagagggcgaggttttgttttgggtggcgtagtgttttcgtgtttatagtggggagtgaggggtggggagttggtgaattttttaagtggaaagagggagagtttattttttttttttttaataataagtttatatggtttgaatgaattttagttttttggtagaatagtttagggaaagttattgatggtttgttatagggttggtatttggtttagttaatttatgtgtttaagttagtgtgaatgggtatttttttttatatatatgtttatttatttttttaaatatttttttattcgtttatttatttatttatttatttttttttatgtttttttggggtttttatatttatttatttttttgtttatttattaattatttaggtttatttattattttatttatttatttatttaattatatattttttaatttatttaattatttatttttttatttatttttttatataattttttatttattattttatatttttttttttatatttttttataaaattataattatttattatttttttttttatttatttatttatatatttgtttattgatatatttatttattttttatttgtttaagattaatatatttatttattattttatttatttttttatttatttatacgtttatttattatttttgtttttattatttttttttttgtgtaaatattaatttatttttttttattttttttatttagtagattttaaagagaggaagagtttgtaatattttttaggggaagttttttgagattgaaatattatattttgaatgataattttatatttatttataatatattatggtttaatgtttggaaattaaacgtagtatttatttgttatgtgaattattaaaagtaaatttgtatggattt

SEQ ID NO: 511 - DNA, 2251 bp, Artificial Sequence
  chemically treated genomic DNA (Homo sapiens)
ggatttcgagtcgtttttaggtagttaggagcggttttagcggtagtcgtaaattttagtagtcgttcgtgttgttcgtggttggggcggagggtagttagagttggggattaaggtttcgcgttatttgcgcgtatagttttatatttgaacgttgttttttcgtagacgagatcggcgggtattgtaaagttgggattcgtttttgaaggaaaaaaaatagcgagtaagaaatttagtattattttttattgatttatttcgttgtattttttgttttttaagtttttgaaagttggtaattttgatttcggtgtttaaaaatcgatagttattgagatcggttttgagaagtcgaagatttggtagtttttagattgagtaggataaggtgaaagtaggttggaggcgggtttaggatatttgagggttgattttgggggttcgtgaggttgttatcgttgttgtcgttataggtgagatggcgttgggttgacgttggggttaacgggtagagaacgtagggatgcggttttcgtcgaagagagttaagaagggaagagcgcgttttttaaattgtttttgtaatttgtttttagtgagtattttattgatttagaatttatcgagaatagtattagcgagttattttttttttgagatgggttttatttattttggtaatggagtgagttggattgtggggaggaagaggaatgggaaaattagtttataaatattaatgttagtaagagtgtgttgttggtaggacgtatcgcgagtttggagattttggtggtcgtagttggtaagtggttataatttagaaagtaggatcgagttgttttttttgttttattagtgtatcgtttttcgggcgcgggtttaatattttataagtggtaattttcgtttacggtagttttgttttttttttattatttttagatttagttttgtattttaaggttgcgtatcgttagttattattatgtttattttcggggttaattcgttcgtttttttgagtttcgatcggttgaatagtttagtgattatttcggcggtgatgtttattttcggggtggtgggtaatttggtggttatcgtggtgttgtgtaagtcgcgtaaggagtagaaggagacgattttttatacgttggtatgtgggttggttgttatcgatttgttgggtattttgttggtgagttcggtgattatcgttacgtatatgaagggttaatggttcgggggttagtcgttgtgcgagtatagtatttttattttgtttttttttagtttgttcggttttagtattatttgcgttatgagtgtcgagcgttatttggttattaattatgtttatttttatagttattacgtggataagcgattggcgggttttacgttttttgtagtttatgcgtttaacgtgtttttttgcgcgttgtttaatatgggtttcggtagttcgcggttgtagtatttagatatttggtgttttatcgattggattattaacgtgacggcgtacgtcgtttatttttatatgtacgcgggttttagttttttttttattttcgttatcgttttttgtaacgtgtttgtgtgcggcgcgttgtttcgtatgtatcgttagtttatgcgtcgtatttcgttgggtatcgagtagtattacgcggtcgcggtcgtttcggttgtttttcggggttatttcgttgtttttttagttttgtcgcgttttagcgattttcggcgtcgtcggagttttcgtcgtatcgcgggcgtcgagatttagatggttattttatttattgttatttttttggtggtgtttatttgttttatttcgttcgtggtgagtgatcggggttggggttttattcggtttttttttcgtatttatttttcgcgtttatttttcgttttttgttttttttttgagtttttggtagtgaacgtgtcgtttttaggtcggggttgggatttttatattgttttttagagtaggtttaattttttttgaagttttaattttaacgagatttagtaggtgttttgtttttatattttttagtttatgttttcggaagtttgggtttttttttttatcgagatagtttttattttttgttgtttgatattggtcgagttttttaagaaaatttttcgttttttttgttagacgtggaggggagtttgttgtagtgtgatttagtttattttttcgtattgtgaattgtgaattgta

SEQ ID NO: 512 - DNA, 2251 bp, Artificial Sequence
  chemically treated genomic DNA (Homo sapiens)
tgtagtttatagtttatagtacggaggaatgggttaagttatattatagtaggtttttttttacgtttaatagagggggcggggggtttttttggaagattcggttagtgttaggtagtaaggggtaagggttgtttcggtggagaaagaaatttaggttttcgggaatataaattgggggatgtaggggtaaagtatttgttaaatttcgttagggttgggattttaaagagggttgggtttgttttgagaaatagtgtgggaattttagtttcgatttaaaggcgatacgtttattgttaaggatttagagggaaagtagggagcggggaatggacgcgggaggtggatgcgagaaaaaggtcgagtagggttttagtttcggttatttattacgagcgggatggagtagatgagtattattagggaggtggtaatgagtaagatgattatttggatttcggcgttcgcgatgcggcggaagtttcggcggcgtcgaaagtcgttgaggcgcggtaaggttggggaggtagcggggtggtttcgggaggtaatcgaggcggtcgcggtcgcgtggtgttgttcggtgtttagcgaggtgcggcgtatgaattggcggtgtatgcggagtagcgcgtcgtatataagtacgttgtagaggacggtggcgagaatgaggaaggagttgaagttcgcgtatatgtaggagtaggcggcgtgcgtcgttacgttggtggtttagtcgatgaagtattaggtgtttgggtattgtagtcgcgagttatcgagatttatgttgggtagcgcgtaaaagagtacgttggacgtatagattgtaaagagcgtgaggttcgttaatcgtttgtttacgtagtggttgtagaaataggtatggttgatggttaggtagcgttcgatatttatggcgtagatgatgttgaggtcggataggttgaagaagagtagaatgaaggtgttgtattcgtatagcggttggttttcgggttattggttttttatgtacgtggcgatggttatcgggtttattaataaagtgtttaataggtcggtgatagttagtttatatattagcgtgtagaaggtcgtttttttttgttttttgcgcgatttgtatagtattacgatggttattaggttgtttattatttcgaagatgaatattatcgtcgggatggttattgggttgtttagtcggtcggggtttaaggaggcggacgaattgatttcgggagtggatatgatagtggttggcggtgcgtagttttggagtgtaaggttgggtttggggatggtagaagagagataaagttgtcgtgagcggaaattattatttgtaaggtgttagattcgcgttcgagaaacgatatattgataagataaggggagtaattcgattttattttttggattgtagttatttattaattgcggttattaaaatttttaggttcgcgatacgttttgttaatagtatatttttgttgatattaatatttataaattgatttttttatttttttttttttttataatttaatttattttattgttaagatgaataagatttattttaagggaaaagtagttcgttagtgttattttcgatagattttgaattaataaaatgtttattgaaaataagttataaaagtaatttggagagcgcgtttttttttttttggtttttttcggcgagggtcgtatttttgcgttttttattcgttgattttaacgttagtttaacgttattttatttgtagcggtagtagcggtggtagttttacgagtttttagggttagtttttagatgttttggattcgtttttaatttgtttttattttgttttgtttagtttggaaattgttaaattttcggttttttaaagtcggttttagtggttgtcgatttttggatatcgaggttagagttgttagtttttaaaaatttgggaaataagaggtgtagcgggatgggttagtgaagaatggtgttggattttttattcgttatttttttttttttaaagacgagttttagttttgtagtgttcgtcggtttcgtttgcgggaggatagcgtttaggtgtgaggttgtgcgcgtaggtggcgcggagttttggtttttagttttggttgtttttcgttttagttacgggtagtacgggcggttattggagtttgcggttgtcgttgaggtcgtttttggttatttgggggcggttcggggttt

SEQ ID NO: 513 - DNA, 2586 bp, Artificial Sequence
  chemically treated genomic DNA (Homo sapiens)
ttcgcgcgggcgcgggagtagtttcgttgggcgttcgtagtcgcgggagttaagttttttttttaggtgtaggtataaaagtttatggtttttgaataatgcggggtagaggtttttttaagtaacgtttaattggtcgtttttaattaaggaaagagaggtttttagttttatggtaatttaagtagggtagttttaggttaaaggtattttagaataataagattattttaagaaatggaatgttttattggatattcgaataggttttttgttattggaattggtgtgtattgtattttaattagtatttttgtgtggagggaggcgatttagtttaggaaagttaattatagaaagaggtgattttcgaaaggattgttttagcgttattagaatatatgtgattatattaaaagtttaggcggatattcgtagttagttcggatttggataatttaatattgttggtagaattgaagggaataagttattttaattttattttttgtacgcgtagtgttgagtgagttgggggtgggaggatagcggttcgtttattgtttttttttaaaatttgagatttgaaaatatggaggttttattcgtttttttagtttttgattgttaataaaaaaataaatttcgttggttatattttttttttattttaaaatagtaattttatggtttgtattaagttttttagaagtttattttatttgttttgggttagggagggaataatgttaggaaaagttatcggtgtttttttattttcgttttttttagggtgtaggatgtgcgggtcggcgggtttgtgatttcggaacgttttttgttatttttttgcgcgaatttgaaaggattgggaggtgttgagagtagagtttagggttggtgtattttgcggtgttgagtgggcggcgcgttcgggcgtttaggtcgggggatttgtagtcgttttatcgcggaggggaaaatacgtagttggagggcgtgcgtcgtgcgggttgtgattcgttattttatcggttattttggggtttttttaagtttttaggtagggttgtgagagttttttagagttgaagtttcggaggttgatttgtgggtttggttgttatgggaattcggttggtttaaagaagtttttttttcgggtatttggaattttagtttagtgtggggtatcggggaagtggcgttggggggttgggttgggggattttagtcggtagtttcggagagggtttatttttggggtcgttgggtgaggtcggtacgatttttggttttaaaaggaaagtttttgttttttgttttggcgcgagaagttaaagatttattttgagagcggagagagaaatgttattggtaacgttttttttggaaagttcgagaggggttttttggatatattatttagtgtttttaaattagagaagtagtttttttttggtgtttgggtttagaagtcgttatttatttagtttatggttcgaaattagtatgggaagcgtcggggtaaggtttcgtcggagattagaggtttgtttgtcgggaggagtttttgggggatggggattttatttttttgtttgttttggtttttatttgggacgttttcgtaggagtttagaaagacgatttattatatggtttcgggatagagtagcgcgtttaattttgagggaattttgtgcgtttttttgaggttttagttttttaaggtatcgtcgttcgtttttttttttttagatcgaaattggggaagagtgtgggcgtttttttgtttcgatgagttcgtttttttaaacgtttatttcggttgtattagagtatttgggaaattttgaaaggtgtttaggttttatatagtagcgtttttttatttagtttttgtttttgggtttttttaagagagtttttattttatgtttcggttttttttcgatgtcgggttttcgaggtaggtacggagtttttttgaaagtagttgtttatttgtgtttttttggtgtaaagttagagtttattttgttgggggaaggggaggtagaaaagattatagttgggaaagtgcgtttttcgttttgtttttaaaatatgttttaagattgttatcgcgattgttaggagagttattaacgtttaggggttataaaggaatttttgaattttcggttttttttaaatttttaggtttttaaaattttagtgggggttttttggggttgggatttaggttggtatcgttgggaggatttcgtttagtatttttttattaatattttacgaaggtaggtttttgttttttttggagttttttttttcggaatgtttttaaattttggttaatttatttttttgtgagttattttagggttttgtggttcgggaagagacgcgttaatttcgcgggtttgcgcgtagtttttagtcgtaaagtgttgtaagtgatttttttgacggtttttttcgatcgaagagttcgggaattaaagagaaaaaaaataattttatttttaaaagaataagttattattgcggcgatattgtggcggaggattttggcgatggggt

SEQ ID NO: 514 - DNA, 2586 bp, Artificial Sequence
  chemically treated genomic DNA (Homo sapiens)
attttatcgttaaagtttttcgttatagtatcgtcgtagtgatgatttgtttttttgaaaataaagttattttttttttttttggttttcgagtttttcggtcggaaagggtcgttaggggggttatttgtagtattttgcggttaaggattgcgcgtagattcgcggagttgacgcgttttttttcgggttatagagttttaggatggtttataggggagtgagttagttagagtttgggaatatttcgagaaaagaggttttagagaaggtaggagtttgttttcgtgaaatattaataaagggatgttaggcgaggtttttttagcggtgttagtttgaattttagttttaagagatttttattagggttttaggaatttgggggtttgggaagggtcgagggtttagaaatttttttatagtttttagacgttgatagtttttttaataatcgcgatgatagttttgaggtatgttttaggaataaggcgaaaagcgtatttttttaattgtgattttttttattttttttttttttaataaagtaaattttaattttatattaaaggggtatagataggtaattgtttttagagggatttcgtgtttatttcggggattcgatatcgaagaaagatcgaggtatgaggtagagatttttttgaaaaaatttaaagatagaggttgagtagggagacgttgttgtgtgaggtttgggtattttttagagttttttagatgttttggtgtagtcgaagtaggcgtttggggaggcgaatttatcggggtaaagaagcgtttatatttttttttagtttcggtttagggaaagaagaacggacggcggtgttttggaaagttagggttttagagaggcgtataaagtttttttaaagttgggcgcgttgttttgtttcgggattatgtagtggatcgtttttttgggtttttacggaggcgttttaggtgggaattagagtaagtaggagaatggggtttttattttttaggggtttttttcgataggtaggtttttagttttcgacgaagttttgtttcggcgttttttatgttgatttcgaattatgggttgagtgagtggcgatttttgagtttaggtattaaagaaaaattatttttttggtttgggggtattaggtagtgtgtttagaagatttttttcgaattttttaaagaaaacgttattaataatattttttttttcgtttttaaaataagtttttggtttttcgcgttagaataagaagtagaaattttttttttggagttaagaatcgtgtcggttttatttagcgattttaagggtaggtttttttcggagttgtcggttgaggttttttaatttagttttttagcgttattttttcgatgttttatattaaattggaattttaggtgttcggaagaaaggtttttttggattaatcgggtttttatagtagttagatttataggttagttttcggggttttagttttaggggatttttatagttttatttagaggtttggggagattttaggatgatcgatggggtaacggattataattcgtacggcgtacgttttttagttacgtattttttttttcgcggtagggcgattataggtttttcggtttgagcgttcgggcgcgtcgtttatttagtatcgtagagtgtattagttttgaattttgtttttaatattttttagtttttttaagttcgcgtaaggggatggtaggaagcgtttcgggattataggttcgtcggttcgtatattttgtattttggaaggggcgaggatggaagagtatcggtgattttttttagtattgttttttttttggtttagagtaaatgagataaatttttgaagggtttaatataagttatagggttgttattttggaatgaggagaaaatgtagttagcgggatttgtttttttgttggtaattaagagttgggaaaacgaatgggatttttatatttttagattttagattttaaaagggggtaataaacgaatcgttgtttttttatttttaatttatttagtattacgcgtataggggatggggttggggtaatttgttttttttagttttgttagtaatgttgaattgtttaaattcgagttggttgcgggtgttcgtttgggtttttggtgtggttatatgtattttaatagcgttaagataattttttcggaggttatttttttttgtagttgatttttttagattgggtcgtttttttttatataagagtattggttgaagtatagtatatattaattttaatgatagagaatttgttcgggtgtttagtgagatattttattttttagaatgattttattattttaaagtatttttagtttgaagttgttttgtttgggttgttatagagttggaagtttttttttttttaattagaagcggttaattagacgttgtttggaaaaatttttgtttcgtattgtttaagagttataaatttttatgtttgtatttggggagggggtttgattttcgcggttgcgagcgtttagcggggttattttcgcgttcgcgcggg

SEQ ID NO: 515 - DNA, 2553 bp, Artificial Sequence
  chemically treated genomic DNA (Homo sapiens)
ttggttatttttgtttttttttagatttttagagtttttagtgtagttatagaggatgttgttggttttagttttaagaagacgtcgttttttttagagggttaagtaagtgggaatttttttttttatttgttttgggttttaggtagggtttttggtgtaaggtttggggttggaagtcgatttatttaggtttaggttttggggtagaattgaaattttttggttattgtcggttgtagtttgggagtaggttattgttaaagttgtgggtttttttaggatagtttttttatgaggtcggttttttatttgttgtttttttatatttggtggttagggatgtggttttgggtagaacgatgattttttatttttgttattatggaagttatcgttgttttttagtttagttagttatttgggttgtagagtattttttttatgtttttcgggtgtttttttttttttttgttttagtttggttttgttttattttgtttttagggaggggtattttggagtggggttagggtatggttttttttcgagggagtttttttttggttgtttttagggtagttttgtatagttttagtatttggcgtattttttttgatattttttttagggatagttaggtattttgtgtggggtatttaagagagttaggttcgttagtttttagtttttgttagaatgtaggtttgaggggtgaggggcggggtaggggtagggataggaatttcggcgtgttttttattcgtaaaggtttattgaggtttcgagttttagttattgagttattaagttagtttgggttaggtttgggtgttttgtttgtaatggaggtagagacggggtttcggggtagttttgaggatgttgggtgtatagcgggggtttcgtcggtaggaattatttatgtttttttttgggttaagttttgtggatgtttagtttggggtcgcggggagttggtaggttagtggtagatattggtgggtagatttagtgtttggtagaataggtattaaggaagtggtgatcggagggaagttaagtgtatttaaattttcgggtgagttattatcgtcgggttttttatagttgttgaaagtgagtaatagtgatgaaggtttgtgagtttttgcgtgagcgagtgaatggattagtagtagtttttaggttgtggaagagcgtttttttttcgggatggggatatttggttatagtaatttttaattttttatttatttatcgtttattgtagaggtatgcgggggttttgttttttgtaggtaggagtgaggggtatttttgtgatgtggtatttttgtgatcgaggttatgtgtgatcggtgtaagggtaggaagcgagttattggtttgtattaggcgtgggggtttttgcgagggtaggatttaaagtcggtttggtttttcggttgtagtatttttttttttttcgaattaggttagagttttgggacgggaggtgttttgtagattattttttttattaattttcgtttttcgttttattttcgcggtgattcggtgaattgtcggttttttgttgtgtatcgagtggggtagtgattttgacgtggcgttttttgtcgtttttgttatcgttattattttcggtggtttagttttcgtattttttatttttatggaggaatgtattaggtttttttttttggatgtattttttatttatatgtttttaaattttggtattttttgttttttttttatttttatttttttttttaggtttttagataaaggggaagtggttggatttttttaaagggatagtgttttattagtttattgttgaatttttttttttaattttagttttttagttatagttaattagtattagtagatagtttatgagtgatatttatgtaggttttaggttgtggagagttttttgggtaggaaatagtttttaaggttttttattttatttaggttttagttttttttatttgttttttttttagattgtggttttttggagtttggtttttttgtttttgtgtgatcgatatatagtatttaaatagtggtagagcgggacggattttttagtttgttttttgtgtgggtttgtattttgatttagatatgtttttttatagtaggatttaggggggtatatgtgtgtttgcgggtttattggggtattcgtatttggtttattttattttttagagagagggttttgttgtgttatttagttggagtgtagtggtgtaattatagtatattgtagtttttaatttttgggtttaagcgattttttttttttagtttttttagtagttgggagtataggatttattgtattttggttaattttttaataattttttaagagatggggttttattgtgttgtttaggttggttttaaatttttggttttaagtgatttttttattttcgttttttgaagtgttgagattataggtatgagttattatgtttattttagattgatatttttatatttgtttattttggttgggtaggg

SEQ ID NO: 516 - DNA, 2553 bp, Artificial Sequence
  chemically treated genomic DNA (Homo sapiens)
ttttgtttagttaggatgaataaatatagaaatgttagtttgggatgggtatggtggtttatgtttgtaattttagtattttaggaggcgaaggtgggaggattatttgaggttagaggtttgaggttagtttgggtaatatagtaagattttattttttaaaaaattattaaaaaattagttaggatatagtgggttttgtatttttagttattagggaggttggggagggaggatcgtttgagtttaggagttgaaggttgtagtgtgttatgattatattattgtattttagttgggtgatatagtaagattttttttttaaaaaataaaataaattaaatgcgggtgttttagtgaattcgtaggtatatatgtgtttttttgggttttgttgtgggggggtatgtttgggttagggtatagatttatatagagaataggttagggggttcgtttcgttttgttattgtttgggtgttatgtgtcggttatatagggatagaagaattaggttttaaagggttataatttaggagagaggtaggtaggaaagattgggatttggatgagatgagggattttaagggttgttttttatttaggaaattttttatagtttggggtttgtatgggtattatttatgggttgtttgttaatgttaattaattgtaattagggaattggggttgaggaggggagtttagtagtaagttggtgggatattgtttttttaagaggatttagttattttttttttgtttgggagtttaggggaaggggtgggagtaaagggggagtagaaaatgttagggtttggaagtatgtgggtgaggggtgtatttaggaagggaggtttggtgtatttttttatgggggtggggaatgcggaggttgggttatcggaggtggtggcggtggtaggggcggtaggagacgttacgttagggttattgttttattcggtgtatagtagggggtcggtagtttatcggattatcgcgggggtggggcggaggacggaagttggtgaggggggtggtttatagggtatttttcgttttagggttttaatttaattcgaaagggaaaggagtgttgtagtcgggaggttaggtcgattttgggttttgttttcgtagaagtttttacgtttggtgtagattaatgattcgttttttgtttttatatcgattatatatgatttcggttataggggtgttatattataggagtgttttttatttttgtttgtaggaagtagggttttcgtatatttttgtagtgggcggtgggtgggtgggggattaggaattgttgtaattaagtgtttttatttcggggagggaacgtttttttataatttggaaattgttattggtttatttattcgtttacgtagaaatttataaatttttattattgttgtttatttttagtagttgtgaaagattcggcggtgatgatttattcgagggtttgagtgtatttggttttttttcggttattatttttttgatgtttgttttattagatattaggtttgtttattagtgtttgttattgatttgttagtttttcgcggttttaggttgggtatttataaagtttggtttaggagagagtataagtgatttttgtcggcgaggttttcgttgtgtatttagtatttttagaattgtttcgagatttcgtttttgtttttattgtagatagggtatttaggtttggtttaggttgatttggtggtttagtggttggggttcggggttttagtgaatttttgcggatggagagtacgtcggagtttttgtttttgtttttgtttcgttttttattttttaggtttgtattttggtaggagttagaggttgacgggtttggtttttttgagtgttttatatagagtgtttgattgtttttaagaaggatgttaagggaggtgcgttaggtattgaggttgtgtagagttgttttggggatagttagagaggaattttttcgggggagagttatgttttggttttattttagggtatttttttttgagagtagggtaggataaagttaggttggggtaggagaagggggaggtattcggagggtatgaaaggggtgttttgtagtttaggtggttggttgggttgggagatagcggtggtttttataatgataggagtggagaattatcgttttatttagggttatatttttggttattaggtgtgaagaaatagtaggtggaggatcggttttatggggagattgttttggaaggatttatagttttggtagtggtttgtttttaggttgtagtcgatagtaattaaggagttttagttttgttttagagtttggatttaggtgggtcggtttttagttttaggttttatattaggggttttgtttggagtttaggataagtagggagggggatttttatttatttagttttttggaggaagcggcgtttttttggggttgaagttaatagtattttttgtggttatattgggggttttggaggtttaagggagggtaggggtggttag

SEQ ID NO: 517 - DNA, 2365 bp, Artificial Sequence
  chemically treated genomic DNA (Homo sapiens)
gtggtcgtggtgggggtgttagttgtaggggtgttttcggtgggtgggagttggtggtttttcgttggtgttatgggattcgtatgttcgttttgcgtttttcggtttttgagtttataggtcgggattttgtttgttagtcgcgtgcgttgtcgtttaatttttgtaggcgtagagcgcgcggcggcggtgatagagaattttgtttggttgtttaaatatagttttttgtagaaggattttgcgttcggggaaggggaggaatttttttttttttgggcgttcgtttttttcgttatggttcggtttttatattcgtttatatttggtcgtagcggggcgttcggggggaggggttgaggtcgcgtttttcgtcgttttttgggcgcgggttaggcggggaggaggggggcgtttcggtcgtgtgtttaggattgttttttagcggttattcgggttttagttttttaggtttggttttgataggcgggcggagtagttagtgcgagatagggaggtcggtgcgggtgcgggaatttgattcgttcgggaggcgggggcggggcgggggcgtagcgcgcggggaggggtcggcgttcgttttttttttttatttatttagttgagttagggggtttaggggttttttcggcggttagttttgtattgtaggagcgcgggcgcggcgttttagttagcgcgtagggttcgggtttcgtcgggggcgttttttcgtcgttgtttttcgcgcgattcgttgtttattagttattatgtcggatttcgcggttaacgcgtagttggatgggattatttcggatttcgaaggtgggtgttgggttggttgttgcggtcgcggacgtgttggagaggattttgcgggtgggtttggcgcgggacgggggtgcgttgaggggagacgggagtgcgttgaggggagacgggatttttaatttaggcgttttttcgttgagagcgtcgcgcgttttcggtttcgtgttcgcgtcgtttacgtgggggattttgttaggggtattcgcgtagattttgcgcgtttttataggattttgtgttcgttttgcgtattgtcgtttgggtttttttttttttattgttgtttgtgtttgttaagcgatagcgattttttcgagggttcgcgaggttgtttcggaattttttaggacgtatagttttattttgggaaatttatcggttttttttttttggtttttttcggcggttttcgggtttcgtttggattcggtaacgggatagggaggtcgttttttattttcgattgagtggatagtcgcgttttgttcgggtggatagttttttttttttttacgttagtttcggggtcgttaagttgtgtagttcgtgggtcgggagtatcgaacggatatagtttaggtcgtggtagggtttagagtgggatgttttatggtttttatttaggtttggggatatttttattcgttttttagaatcgggtcgtgggggatagaaggggtttgcgtgcgggtagggagagtattttggtttttttttgttttcggggtttataaagtgtgttgggatttgcggggttgttttgtttaagtttgggtttggcgttcgcgtttttgagtttgtgagtgcgtgcgtttttttgcgtttttttgattgtcggtgttggggttttgcgttttgcgttcgcgggagtaaatatagtaggcgaaggggaagtttatataatggtttttagcgttttggggtagggtttttgaggggcgggtttgtttttgtcgggatttggagttttcgtttttcggagaggtttttaggttgatttgggtagagttttttggtgggtcgggagggggaaaggttgtgttgaaatgagtaaattgtttaggtgttaggttaagttgggaggtgattagtttgaggtttttttcgttttatggttagaattagggttgatatttgggtgttttgagtttagttgtttatacggtttatttggggttagttttatttgagtgggggaggcggggttttttgggggattagaattttggttggacgttaagtagagtgttagtggttgttttttagggttgggtttgaggagggtgtggggcggcgaagggacgggagggggttgtgatttagtggttattggcgttgtgtagagtgtgagttggaaatatcgtagttattttgttagtttagtggtgaaagtttttttttaggttttatttttttgtatttttgttttttagagggaggggaggtttgggtttgtagagttgggagggtttgttgttttcgttttttttttttataatatttttttatttggatatttttgggtatatgt

SEQ ID NO: 518 - DNA, 2365 bp, Artificial Sequence
  chemically treated genomic DNA (Homo sapiens)
gtatgtgtttaaagatgtttagatgaggaggtgttgtgggggaggggggcgggaatagtaagtttttttagttttgtagatttagattttttttttttttgggaagtagggatgtaaagggatagagtttgaaaaagggtttttattattaagttgataaagtaattacgatgtttttagtttatattttgtatagcgttagtggttattggattataattttttttcgttttttcgtcgttttatattttttttaggtttagttttgaagaatagttattggtattttgtttggcgtttagttaaagttttggttttttaggaggtttcgttttttttatttagatagggttgattttaggtgggtcgtgtgggtagttgggtttaggatatttagatgttagttttggttttggttatggagcggggaggattttaggttggttattttttagtttggtttgatatttggatagtttgtttattttaatatagtttttttttttttcggtttattagagggttttgtttaagttagtttaggagttttttcgaggggcgggggttttaggtttcggtagaggtaggttcgttttttagaagttttgttttagagcgttggagattattgtgtgagtttttttttcgtttgttgtatttattttcgcggacgtaggacgtagagttttagtatcggtagttaagaggacgtaggaaagcgtacgtatttataggtttagagacgcggacgttagatttaggtttggatagagtagtttcgtaagttttaatatattttgtaaatttcgaagataggagagagttaaaatattttttttgttcgtacgtaggttttttttgttttttacggttcgattttgggaggcggatgaggatatttttaggtttggatgggggttatgggatattttattttagattttgttacgatttgggttgtgttcgttcggtgttttcggtttacgggttgtataatttggcggtttcgaaattggcgtgggggaggggagggttgtttattcgagtaggacgcggttgtttatttagtcggaggtgaggaacgatttttttatttcgttgtcgggtttaagcggggttcgagagtcgtcggggagagttaaagggaggggatcgatggattttttagagtgaaattgtgcgttttggagagtttcgaggtagtttcgcgagttttcgaggaggtcgttgtcgtttggtaaatataaataataataaaaggaaggaaatttaggcggtagtgcgtagaacgagtatagggttttgtgagggcgcgtagggtttacgcgggtgtttttaatagggttttttacgtaggcggcgcgggtacggggtcgggggcgcgcggcgtttttagcgggagggcgtttggattaggggtttcgtttttttttagcgtattttcgtttttttttagcgtattttcgtttcgcgttaggtttattcgtagggttttttttagtacgttcgcggtcgtagtagttagtttagtatttattttcgaagttcgaaatgattttatttagttgcgcgttgatcgcggggttcgatatgatggttggtgggtagcgggtcgcgcggagggtagcggcgaggaagcgttttcggcggggttcgggttttgcgcgttggttggggcgtcgcgttcgcgtttttgtagtgtagagttagtcgtcggaggagtttttaggttttttggtttagttgaatgaatgggggaggaaggcgggcgtcggttttttttcgcgcgttgcgttttcgtttcgttttcgtttttcgggcggattaggttttcgtattcgtatcggtttttttgtttcgtattggttgtttcgttcgtttgttaaggttaggtttggggggttggggttcgagtggtcgttgggggatagttttgggtatacgatcggagcgtttttttttttttcgtttggttcgcgtttaggggacggcgagagacgcggttttagttttttttttcgggcgtttcgttgcggttagatgtgggcggatgtggaggtcgggttatggcgaggagggcgggcgtttagaggggaagagattttttttttttttcgggcgtagggtttttttgtaggaggttgtatttgggtagttaaataaagttttttgttatcgtcgtcgcgcgttttgcgtttgtaagggttaaacggtagcgtacgcggttggtaggtaggatttcggtttgtgggtttaagagtcgaggggcgtagggcgaatatgcgagttttatggtattagcgagaggttattaatttttatttatcgagggtatttttgtagttaatatttttattacgattat

SEQ ID NO: 519 - DNA, 2367 bp, Artificial Sequence
  chemically treated genomic DNA (Homo sapiens)
gacgtgtgcggcggtaagcgttcggttcgtatttttttcgtatttcgtaatttcgattttggcggtttttagattcggcgaaatcgtgaagtttcggttttaggagttttttagatttatggttttagattcgaatttttagatttgttcgatttttttttatgtcgtttcggggatttttttttattttttgttttatgatttaaaatataggtttataggttttagagatattttgtgaatttttttttggggtgttttgaatcgcgatcgtagatttgtgtttttagttttagcggggaattttattgttcgggaatttagagtttatagttacgattttagattcgagtttatagagttagaggtgatattggaattttgtcgttgggaatatttaaatttttaagtttatatttgggattttttaaatttcgttttggggttttttaggtcgtggatgtttgtttcgcgtttatgatttgttaaggatttttatatttaggttgggttttggattttatattttagcgtttagatatgtcgggaacgttttacgttaatttggggtttttattaagagaatttttattagatttgtatttttttttttacgcgtgtatttagtttaggtttttttaagttttacgggtgttttttagatttgaggaggttgtaaatttgattttttatatttgttttatttattcgcggataattcgttttcgtaaatttagatttttattcggaggttttagattttttttaggtttagttgtcggaaatgcgtgtttgaagggagggtgtgggtttaggggcgaagtatttattggtttttttttttttttttagtagtgagtcgtagttatgtttttggttaattcgtttttgaagggcggcggcggcggcggcgggggaggcgggggtttgggtgggggtttgggaaatgtgtttggaggtttgattagcggggtcgggggcggcggcggcggcggcggcggcggcggcggtggtggaggcggcggtggcggtggaacggttatgcgtattttaggcggagttattagcgttattaggtaaggcggagattattagaggggcggggtttgggaatgggaggagttttagtgaggcgtggtttgggaggggcgtggtttaaaaatagaataggattaatttggaggttaatttgggtatatgaattaggtcggggaggtttggtttgagagttttgttgtaagggggtggattttagtgaggcggatattagttattgggggcggtgtttgatatgggagtagtttgattgtgtgggattaggataatgtggttttgaggggattgatgtggagttttggcgggtggggtttatgggtttgggtttagtttgtattggttaatttggagatgaacgttaaaggtgcggagttaatgcgtttgagtgatattttacggaaggggtttgatttatgagtgtggttagaggttttaggtgggttaatgaggaggtgagtttaggaggaagtaagatttaatggggtagggtaaatggtttagaatgggttgggtttgttgggaattggttggattaatggagaaaaatgttttggtagggatagggtaggttggtttaattagttacggttatttagtagtgattttttgaaggggcggggattaatggttggggtaggatgttgggaagacgggtatttaggaagcgggttatggagtagggttttgggtagatggtatttgaggaggataaggttttgggaagttggggtagagtttttatgaagtgagttttttaaggggcggggttttttgattttacgtgggattttttaggtttagggtggttaagatgattgaaatttgttattgggtaggtgtgtttggtaggaggggagttttttaggggatcggtttttgggttttttcgagggtggggttggtttgaggaagggagaagaggggtacgattagggtagtgtggattgggatagatgaggataagaataaatgaaaggtatagtaattaagtaaggaagataacggttggggtttggagcgttggggttgatggttttgtagtgttgttcgttggaggtttcgtttttggtattaattttttttttttattttttcgtagcgaggcggttgcgtagtataattcggagttttcggtaagttttttttgtaattagattttttttttttgttaaggttttttcgaggttttatttttgtttttgtagagaagttttattttttttttttttttgtgaaatttttttgttagttttttttatgtcgtgtttgtagtttcgttatgggttttagttatgttttatatacgtgtat

SEQ ID NO: 520 - DNA, 2367 bp, Artificial Sequence
  chemically treated genomic DNA (Homo sapiens)
gtgtacgtatgtggggtatggttaagatttatggcgaagttgtagatacggtatgggaggaattggtagaggaattttataagaaggggaggaaggtggggtttttttataggaatagggatgggatttcgaagaggttttggtaggagaagggggtttggttgtagagggggtttatcgggggtttcgggttgtattgcgtagtcgtttcgttgcgaagagataagggggaggggttagtgttaggggcggggtttttaacgggtagtattatagaattattagttttaacgttttagattttagtcgttattttttttatttggttgttgtgttttttatttgtttttgtttttatttgttttaatttatattgttttggtcgtgtttttttttttttttttttaggttaattttattttcgaggaaatttagagatcggttttttgggaggttttttttttgttaggtatatttatttagtggtagattttagttattttggttattttaaatttaaaaaattttacgtagaattaaaagatttcgttttttggagggtttattttatagaggttttgttttagttttttaaggttttattttttttaggtgttatttgtttaagattttattttatggttcgttttttaaatgttcgtttttttaatattttattttagttattggttttcgtttttttaagggattattgttaagtggtcgtggttaattaagttaatttgttttatttttattagggtatttttttttattaatttagttagtttttagtaagtttagtttattttgggttatttattttattttattaggttttgtttttttttgggtttatttttttattaatttatttaaaatttttgattatatttataagttaagtttttttcgtaaaatgttatttagacgtattggtttcgtatttttaacgtttatttttaggttagttaatgtaggttgagtttagatttataagttttattcgttaaaattttatattagtttttttaggattatattgttttggttttatataattagattatttttatattaagtatcgtttttaatgattgatattcgttttattggggtttatttttttatagtagaatttttaaattaggttttttcggtttaatttatgtatttaggttagtttttaggttaattttattttatttttagattacgttttttttagattacgttttattgaggttttttttatttttaggtttcgtttttttgatagttttcgttttatttgatggcgttgatgatttcgtttaggatgcgtatggtcgttttatcgttatcgtcgtttttattatcgtcgtcgtcgtcgtcgtcgtcgtcgtcgttttcggtttcgttgattaggtttttaagtatattttttaggtttttatttaggttttcgtttttttcgtcgtcgtcgtcgtcgttttttaagaacgagttaattaggaatatggttgcgatttattgttggggggaaaaaaggggattagtgggtgtttcgtttttgagtttatattttttttttaaatacgtattttcggtagttggatttgggaggaatttgaagttttcgggtgggggtttgagtttgcgagggcgggttgttcgcggatgggtggggtaggtatgggggattaggtttgtaatttttttaggtttaaaaggtattcgtggggtttgagggagtttggattgggtgtacgcgtgaaggggagggtgtagatttggtgggggtttttttggtggggattttaagttggcgtaaggcgttttcgatatgtttgggcgttagaatgtgagatttagagtttagtttgaatgtagaggtttttggtaggttatgggcgcggagtaaatatttacggtttaaagggttttagggcggggtttaggaaattttaaatgtgggtttgagaatttaggtatttttagcggtaggattttagtgttatttttggttttgtgggttcgggtttaagatcgtggttgtgagttttgggttttcggataatggggtttttcgttggaattgggggtatagatttacgatcgcggtttaggatattttaaggaagaatttatagggtatttttgaaatttatgggtttgtattttggattatgagatagagggtggagaagggttttcgggacggtataaaaggagatcgaataggtttgagggttcgaatttgagattatggatttggggggtttttgaggtcgagattttacggtttcgtcgggtttgggggtcgttaaagtcggagttgcggggtgcggagggggtacgggtcgggcgtttatcgtcgtatacgtt

SEQ ID NO: 521 - DNA, 2804 bp, Artificial Sequence
  chemically treated genomic DNA (Homo sapiens)
ttaaggttcgtcggatttgaggtcgtttggggcgttaaatagatttatttatgagtatattcggttaatatatttaagtttaatagtgggcgggatttttggttggtttcgattttttttatagtgtgtgtaaacgggtatttattagattttttttgtttgtttttttatttgtaaattttgaaaggagagtatttttcggggtgattttgaaaattatgttagaattgaaaaggtttgtgtaaatgcgaggtgtaatgatgatttattagaagtagttagttttgtacgtgtttgtaggatagatgttagaacgttttataaatgtgtgtatatatatattacgtatgtgtgaaggtgtatatttgtttttagatatttgataaatgtatatacgtatgcgtgtatttttggttgagagtaaaggggttaatatagggtttatataggatattattttgtagttttgtgcgtgtatagtatatacgcgagtacgattgtttgtgtttggagatatcgtatggtatcggaggagttgtttagtcgtcggtgttatttgggaagtagggtttcgggtgttgttttggagcgcgggaaagttcggattcgggtttgttggttagcgtttcggcgtcgtcgggtttttttattttttattcgtcggtcggtgagcggttttagttttaagattttcgattttgtcggtgaggggagggagcgagaaggagtgcgtttcgggtttaagaggttgtagggttttattttttaggtttgtcgttttttttttatttttttaggttatatttttatttaaaataaagaagggtgtttgatttatttaggttagggaagtcggttttcgggagttttttgtttttataagttatggtgaagggaggcgaagttagggtttgttacggtttgggagaaaatgcggttgtagggtttttttgggttgtagcgttggttcggggttttaagattgttaaggtgtgtgtgggaggcgcgtagtgtggttatcgaagagttttttattatcgtatcggtaggtcgtcgggttcgttttttttttatgtttttaagggttttgagttgcgtagtattcgtattatttagaagtgtttgtggagaaaacgattttaggtgtaagtttaaggttgttgtttgtaaaggtaatgtcgtggagattgggttttatagcgatttgggtttttaagttatcgaaagttatagggtagggttataaatattttttcgttttttttgtagaatcgtgcggttgataggagagcgttgcgtagaaaattcgaggtcgggcgttggaggagttttcgcggttcggagaaggtatagaggcgtttttgagaggcgtagttggaataggcgatgtacgggttcggatttggtcggttaatcgagtttagcggtcgcgaaaattagagtcgttatagaggttgagtacgattttatttttggggatcgggttcggtggggagttattgtttttaacgtttttagagattttaagtaggataatataatgttggtaggagtaaggtgtaaggaatttagcggtagaagtttttcgggggggtggggaaaggtagattcgtgtttcgtttgagtttgggggtggggatagtttttggttttgtagtttttgtttcggggattagttgggtttatttaatttttttatatggggttgaaaggggttaatgggacggtttcgtcgtttttttttcgggattttatagggttttgattcggtttttatttttgtacggttagtagtcgcgggggttttaggaaggaggataaaggttcggtgttatcgcgggcgggggttcggttttttggttttttgtttatatttatagtttttagcggttgttgggggaagatttttaaaaatatgtgtcgaatttttttttttttttttttagaaataaataaataaaaaaggtaaaaggcgaatttttttttatttttcgtttatagagattaaagttttttgggattttgttttttttttttttttgattgtttagaaatatttgtttttttttgtatatagaggaaaatgcggggaaaggttttttaaaattcggttttatattattattattattaaggataatcgggtaggttgaggttttaacgtggatgattcgagttggtttcgcgtcggggttttgtagttattgttttgtgcgtttagtatttttgggggcgattagggtttttgcgttttcgttcgtcgttcggtagtcgagagtattttgtgtttagattggtcgatttattttttttcgaattttgtttagagttggtaagggggatttagttcgcgttttaagatttgggtttgtagcgtcgttaataggttcggggatacgaggcgttttaggtcggggttttttcggttgttggtttttttcgttttttattcgttggcggcgtttcggtcgttcgtaattgatttaattcgttttttgcgtttgttttttaggtttttcgtttttttataaaggtttaggggagtttcgtttataggttgattttgtaatttttggttcggtggttattttttgtttttttgaaaaagaaaaggaaaaaaaaaaaaaaaaagaaaaaattaattagtcgagggaggcgcgtgaggattggaggcgttagtcggatagtttatgagtaggtttttgggtcggtgtcgtttcgcgggttagtacggttttttttagagaaaattttttaaacgtgtgaagatcgttttgggggaagcgagagggaggttggaggag

SEQ ID NO: 522 - DNA, 2804 bp, Artificial Sequence
  chemically treated genomic DNA (Homo sapiens)
tttttttaatttttttttcgttttttttaaagcggtttttatacgtttaggaggttttttttgagaaaggtcgtgttgattcgcgaagcggtatcgatttagggatttatttataggttgttcggttggcgtttttagtttttacgcgtttttttcgattggttgatttttttttttttttttttttttttttttttttttttagaaaagtagaaggtagttatcgggttagaggttgtagggttagtttgtgggcgaggtttttttaggtttttgtggagaaacgggaaatttgaggggtaaacgtaggaagcgggttgggttaattgcgggcgatcgaggcgtcgttagcgggtggggagcgagaggggttagtagtcgggaagatttcggtttggagcgtttcgtgttttcgggtttgttggcggcgttgtaagtttaggttttggggcgcgagttaagttttttttgttagttttaaataaaattcgggggagaatgagtcggttagtttgggtatagggtgttttcgattgtcgggcggcgggcggaagcgtaggggttttgatcgtttttagaggtgttgagcgtatagggtagtggttgtagagtttcggcgcgaggttaattcggattatttacgttgggattttagtttgttcggttgtttttagtaataataatagtatgaaatcgagttttaaaaaattttttttcgtatttttttttatgtataagggagaataagtatttttaggtagttaaagaaaaaaaaagggtaggattttaggaaattttaatttttatggacgaggagtgaaggggaattcgttttttgttttttttgtttgtttgtttttagaagagaaaaaaaggaaattcgatatatatttttaaaaatttttttttaataatcgttaaaggttgtgagtgtgagtagagagttaggaaatcgagttttcgttcgcggtgatatcgggtttttgtttttttttttgaagttttcgcgattgttgatcgtgtagagataaaggtcgggttagggttttgtggaatttcgagggaggggcggcggggtcgttttattggttttttttaattttatgtaggggggttaggtgggtttagttgattttcggaataggggttataaggttaggggttgtttttatttttaggtttagacgaggtacggatttgtttttttttattttttcgaaaggtttttgtcgttaaattttttgtattttgtttttattagtattatattgttttatttaaagtttttggaggcgttagggatagtggttttttatcggattcgatttttagaaatggaatcgtgtttaatttttgtggcgattttggttttcgcgatcgttgggttcggttggtcggttagattcgaattcgtgtatcgtttgttttagttgcgttttttaggggcgtttttgtgtttttttcgggtcgcggagatttttttagcgttcggtttcgaattttttgcgtaacgtttttttgttagtcgtacggttttgtagagaaggcgggagagtgtttgtgattttgttttgtagttttcggtgatttaaaaatttaggtcgttgtggaatttagtttttacggtattgtttttgtaggtagtagttttgggtttatatttgaggtcgttttttttatagatatttttgggtgatgcgagtgttgcgtagtttagaatttttggaagtatgagaggaggacgagttcggcggtttgtcggtgcggtgatggagggtttttcggtagttatattgcgcgttttttatatatattttaatagttttggggtttcgggttagcgttgtagtttaaagagattttgtagtcgtatttttttttaggtcgtggtaaattttggtttcgtttttttttattatggtttgtgagggtaggaggttttcgggggtcgatttttttgatttgaatgagttaggtatttttttttattttaagtgggggtgtgatttgaggagataaaggaaggacgatagatttggggagtggggttttgtagttttttgggttcggagcgtattttttttcgttttttttttttatcggtaggatcgggggttttgaaattggagtcgtttatcggtcggcggatgagagataaaggagttcggcggcgtcgaagcgttgattagtagattcggattcggattttttcgcgttttagagtagtattcgaaattttattttttaggtggtatcgacggttgagtagttttttcggtgttatacggtgtttttaggtatagatagtcgtgttcgcgtgtgtattgtgtacgtataagattgtaggatgatgttttgtatgagttttgtattagtttttttgtttttagttagaggtatacgtatacgtgtgtgtatttgttaagtgtttagggataggtgtgtatttttatatatacgtgatgtgtatgtgtatatatttgtagaacgttttagtatttattttataggtacgtatagggttggttgtttttaataagttattattatatttcgtatttatataggtttttttagttttggtatgatttttagaattatttcgggaaatattttttttttaaagtttatagatgaggaaataagtaaaaagaatttaatgggtattcgtttgtatatattgtgagagagatcgaggttagttaaagatttcgtttattgttgaatttgggtgtgttggtcgaatgtgtttatagatgggtttgtttagcgttttaggcgattttaggttcggcgggttttgg

SEQ ID NO: 523 - DNA, 2383 bp, Artificial Sequence
  chemically treated genomic DNA (Homo sapiens)
ataataaagacgtatatatgtatgtttttataaaatttagttgagattttatttttattttataaatattttatttaatagtgtatgaatttaattgtagataaagagatagaaatagaaacgaaggaattttttaattttcgattatagttagagagatatttttttaaaggaattttttaaggataaacgtatattaaattaagtagaagatattaagatttggagtggtttttttatttttttttataattaggttgattaaggtgtgagttgattttggtataatgtatttattttaagtttgatgacgtgtttattattttaaaaggtttttttgtgttttttgtagttagtttcgttttttttttgaggttagtagttaatgatgtagtttttgttattatataggttagttttaattgttgtagaaatttattttgatggcgttatatagggtgtattttttttattattcggtataatgtttttgagatgatttacgttattttatgttttcgtaatgtgttttattttattgttgggtagttcgggtagttggggtagatcgtagtatattttggcgataggtgagattgcggttttgatttgtaggtttcggtgaatatgagtaagggtatttgggcgtcgggagagatttttttttttttatagaaagtaagcgtgttatgttaataatcgaacggggattttgtttttattttaaagaatagtattcgattgcgtagttttttttttggttttaggaggtgagaatatatttttcgttagtatagatattttataaatttttgcggaggttgcggttagaagtagaggttgtgtgaagggtgattttgggggttatgaaaaaatacgaaggtttttatagagtatgagaatttaaaagattggagattatgaagcgatttgtaaaaagtagttttaagtagaaagggaagagaagagttttgcggttatttagtgttaaaagagtttacggcggcggagaggataatacgttattttttgttttttattattgcgattgtaaggagaatatttaatatgttatttaagttataaaattgtagttttaagaataatttttataggggagtttatttttttattataaaaatttaggggaaagcgcggacgtagttttttattattataaattatgtagtcgagttttttatatttggggaaatcgtaggggttagtatattcggagtgtaatggataagtttcgttttgggaaaattattttcgtgattatggtattttttttgttaggtaagtatgattttatatatttttgttttgttatagttttatatattttattttttatatatatggttatttgtttcgcgtattttcgagtttttttagttttgatatatagttgggatttttaggttcgattagcggttttgaattcgtttttacggtacgggagttttttcgtggtgaaatagttagtggcgaagtagtagtttttgcgttgttttatttatatagaagtcgttttattcgtgatgttatcgatagcgtttttttcgtttcggtttgtttttttgttttatttttcgttatttagtcgattaatatggtgttagagtttgcgggggtagtgatgtttgtttttgttttttttttttttttttttcgtttatggttttttttaaagaagcgggtgtttttgttgtagttttttgtttgttttttgttttgcgtcgtttcgttttgtcgtttaggttggagtgtagtcgtatgatttcggttttttgtaattttcgtttttcgggttgaagcgatttttttgttttaggttttcgtatagttgggattataggtatacgttattaagttcggttaatttttgtgtttttagtagagacggggttttattatgttggttaggttgatttcgaatttttgattttaggtaattcgtcgatttcggttttttaaagtgttgagattataggcgtgagttattacgattgtttagaagtcggtttttagtttgtgttgtcgaggatttttttggtagaaatttggagtttgtttatttttttttaaataatggtttgtaatgcgtagattaaaatatggaggattatataagaaattggtttattttatattattatttttgtgatgtagtattttatttgaaattggaagtcgttcgatattagagaaattatatttatgaaattagagaggttgtttagatgattgtaaattagttatttttatttgttttattattagtagtgttataaggacggtggtttaattttaggaattttgtagggtttttttaaatatagtaatgtataaatatgttgttttagtagagtatattgga

SEQ ID NO: 524 - DNA, 2383 bp, Artificial Sequence
  chemically treated genomic DNA (Homo sapiens)
tttagtgtgttttgttggggtagtatatttgtatattgttgtatttgaaagaattttataagatttttgaaattggattatcgtttttataatattattagtggtaaaataagtaaggatggttggtttgtagttatttgagtagtttttttagttttatagatatggtttttttgatatcgaacggtttttaattttaagtagaatgttatattataaggataatgatgtgaagtgaattagttttttgtgtaattttttatgttttagtttgcgtattataagttattatttgaagaagggtggataggttttagatttttgttaaagaggttttcggtaatataggttaagaatcggtttttgggtagtcgtgatggtttacgtttgtaattttagtattttgggaggtcgaggtcggcggattatttgaggttaggagttcgggattagtttggttaatatggtgaaatttcgtttttattaaaaatataaaaattagtcgggtttggtggcgtgtgtttgtaattttagttatgcggaagtttgaggtaggagaatcgttttaattcgagaggcggaggttgtagggagtcgagattatgcgattgtattttagtttgggcgatagagcgagacggcgtaaaataaaaaataaataaaaaattataatagaaatattcgtttttttggggaagattatgggcggggaagagagggaaaggaggtagaggtagatattattgttttcgtaggttttggtattatgttggtcggttgagtggcggagggtggggtagaaaagtagatcgggacgaggaaggcgttgtcggtgatattacggatagggcgatttttatgtagatgaggtagcgtaggggttgttgtttcgttattggttgttttattacgaaggagttttcgtgtcgtgggagcgggtttaggatcgttggtcggatttgagggttttagttgtgtgttagggttaggaaggttcgggggtgcgcggggtaagtgattatgtgtgtaaagggtgaggtatatggagttgtgatagggtagaagtgtgtgaagttatatttatttggtaggggagatattatgattacgaaggtggtttttttagggcgaggtttatttattgtatttcggatgtgttgatttttgcgatttttttaaatgtgggaaattcgattgtataatttgtggtagtgggggattgcgttcgcgtttttttttgaatttttgtaatgaaaaaatagatttttttataagggttatttttaaaattgtagttttgtggtttgggtggtatgttaagtgttttttttatagtcgtaatgatgggaaatagaaagtaacgtgttatttttttcgtcgtcgtgagtttttttaatattaagtggtcgtagggttttttttttttttttttatttggggttgttttttgtagatcgttttatagtttttagttttttgggtttttatgttttgtgaaaattttcgtgtttttttatagtttttagagttattttttatatagtttttgtttttaatcgtagttttcgtaggagtttgtaggatgtttgtgttagcggggaatgtgtttttattttttagagttagggaagaaattacgtagtcgggtgttgttttttgggatgaaagtagggttttcgttcggttgttaatataatacgtttgttttttgtaggggaagggaggtttttttcggcgtttaggtgtttttgtttatgtttatcgaggtttgtaggttagaatcgtagttttatttgtcgttagaatgtgttgcgatttattttaattattcgaattatttagtaataaaataggatatattacggaaatatgaaatagcgtggattattttaaaaatattatgtcgagtgatgaaaagagtgtattttgtgtggcgttattaaggtgaatttttataatagttaaaattaatttgtatagtgatagaaattatattattgattgttggttttagggggagggcggaattgattgtaaagggtataagaggattttttagagtaatagatacgttattaaatttgaaatggatgtattgtattaaagttaatttatattttaattaatttgattgtaaaagggaataagaaaattattttaaattttaatgttttttatttaatttagtgtacgtttatttttagaagatttttttagaaaaatatttttttaattgtaatcgggagttgaggaattttttcgtttttgtttttgtttttttgtttgtagttaagtttatgtattattaaatggaatgtttgtaaaataaaaatagagttttagttaaattttataaaagtatatatatatgcgtttttattat

SEQ ID NO: 525 - DNA, 2417 bp, Artificial Sequence
  chemically treated genomic DNA (Homo sapiens)
aggtaatttgtttattttagttttttaaagtgttaggtttataggtattcgatatcgtatttggttaatttttggtatttttagtagagatatggttttattttgttggttaggatggttttttaatttttgatttcgtgataggttcgtttcgattttttaaagtgttgggattataagcgtgagttattacgtttggttttaggaaatttggatttttaatgtggtatttttaaattttgaaattttggtaattaatgtaatttttagaagattgtgggttaggtagattgtattttatggaggtagaaaaggaggtttgaggtcgggttcggtggtttacgtttgtaattttagtattttgggaggtcgaggcgggtagattacgagattaggagtttgagattagtttggttaatatggtgaaattttatttttattaaaaatataaaaattagtcgggcgtggtggtagcgtttgtagttttagttattcgggaggttgaggtagaagaatcgtttgaattcgcgaggtggaggttgtagtgagtcgagatcgtgtttttgtacggtagtttgggcggtagagcgcgattgttttaaaaataaataaataaaaaattagtcgggcgtggtggcgtatgtttgtaatttagttatttgggaggttgaggtaggagagtcgtttgaatttaggaggcggaggttgaggtgagtcgagatcgcgttattgtattttagtttgggtaataagagcgaaatttcgttttaaaaagaaaagaaaagaaaagaaaaggaggtttgagttcggcgcggtggtttacgtttgtaattttacgtttgggaggttgaggtgggaggattgtttgagttcggaagttcgaggttgtagtgagttattatcgcgttattgtattttagtttgggtgataagagcgagatttcgtgtttaaaaataagtttaaaaaaaaaaaaaaaaaaaaaaaaaggtttgtaatagagacgcgattttttaaaatgttatataggtaagtgggggtcgtatagtttatggtttttagaaagttttttttgggaatgtaaaataatatttattttgggatttttagtttttaaattttttgagtttagaggttttgaagacggattaagtgtaaagttttcgattttatatatcgtttttcgtttttttcgtattatattttttattttttgagtatcgcggttttttcgttttcgggatttcgtttttcgttatttggatggtttgtaaggttattattcgttattttattttatttgggttatgtcggttgtaagtttggtttttatttcgtattttcggagagttacgcgtagatttttttttacggttttattatatttttttaagataggtagtttaggtttgcgttttttgtcgatatttagtatcgaggggtagttttcgaggttacgtagatttttttaatttatacgtatagatcgattcggggaatcgcgggagttagtttcgcgttggggtagtggtagattcgaggcgtgaggcgcgtatgcgtagcgcggtttttattgcgttattgcgagtttagagcgtacggttggattatgagtacgttcgcgttggcgtttgcgcgtttgcgtatttttttttgttcggcgcgcgtcgtagtcgtcgggattatttcggggttgcgttgtttttttagtaagtgtatgcgcgttatggttttagttagtatgtttatgagtagtttttgttgtagttttaggtagttgtttttttttagtaatatttggtttttggatcgttgtatttgcgttttttagttttaggcggttcgcgagagtagcggcgatcgcgttttcgttagttggtttttagtggtttatcgttcgtcgcggaatacgaaggtttggttgttgaggcgtatgtacggcgcgtcgtaggcgaggtttagttcggtttggcgcgtgttgtggtttagtaggtagaaggtggatagggagggtatgcggcgtagtggcggtcgtcgtggcgagaagggtcgcgagatgtgatcggtttaaaattgttgtagcgtttgttataggcggttggtatggttcgtagtcgagtattcgaaggttgttagggcgtggattttgtagggtacgtaggtgttcgaaggggagtttcgggagcgttggcgattcgtgttgcgtttttgtttcgggagttcggatgtttagaatgatgaaggcgagttagggggcgttgttgggagataagagttcgggtgagtagcgtgtttggtataggtcgttttttaaatcgcgaggtcggcggatatgttttagttttgtagttacggttgcggttgtgttttattagttgttggttatcgaggagttcgtcgttttacgttgtataggtag

SEQ ID NO: 526 - DNA, 2417 bp, Artificial Sequence
  chemically treated genomic DNA (Homo sapiens)
ttgtttgtgtagcgtggaacgacgggtttttcggtggttagtagttggtgagatatagtcgtagtcgtagttgtagggttaagatatgttcgtcggtttcgcggtttgagaggcggtttgtattaagtacgttgtttattcggatttttgttttttagtagcgttttttggttcgtttttattattttggatattcgggttttcgagataagagcgtagtacgagtcgttagcgttttcgaggttttttttcgagtatttgcgtgttttataaggtttacgttttggtaattttcgagtgttcggttacgagttatgttagtcgtttgtggtagacgttgtagtagttttgggtcgattatatttcgcggtttttttcgttacggcggtcgttattgcgtcgtatgttttttttgtttattttttatttgttggattataatacgcgttaggtcgagttgggtttcgtttacggcgcgtcgtgtatgcgttttagtaattaggttttcgtgtttcgcggcgggcggtggattattgagagttagttggcgaggacgcggtcgtcgttgttttcgcggatcgtttggggttggaaggcgtaggtgtagcggtttaaaagttaagtgttgttggaggagaataattatttgaagttgtagtaggaattgtttatagatatgttgattgagattatggcgcgtatgtatttgttggagaagtagcgtaatttcgaggtgatttcgacggttgcggcgcgcgtcgggtagaggaagatgcgtaagcgcgtaggcgttagcgcgggcgtgtttatgatttagtcgtgcgttttggattcgtagtgacgtaataaaggtcgcgttacgtatgcgcgttttacgtttcgggtttgttattgttttagcgcgggattggttttcgcggtttttcgggtcggtttgtgcgtgtgggttggggaggtttgcgtggtttcggggattgtttttcggtgttgggtgtcggtaggggacgtaagtttaagttgtttgttttgggagggtgtgatggggtcgtggaggagggtttgcgcgtggtttttcgggagtgcggagtggaagttaagtttgtagtcgatatggtttagatagggtggagtggcgggtaatggttttgtaggttatttaggtaacggagggcgaagtttcggagacggaggaatcgcggtgtttagggaatgaagggtgtggtgcggagggagcggaggacggtgtatggggtcggggattttgtatttggttcgtttttagggtttttaggtttaggaggtttagaaattagaagttttagggtaagtgttattttatatttttaagagaagttttttggaaattatgggttgtgcggtttttatttgtttgtgtggtattttggagagtcgcgtttttgttataggtttttttttttttttttttttttttttaaatttatttttaaatacggggtttcgtttttgttatttaggttggagtgtagtggcgcgatgatggtttattgtaatttcgagttttcgggtttaagtagtttttttattttagttttttaaacgtgggattataggcgtgagttatcgcgtcgggtttaggttttttttttttttttttttttttttttttgagacggagtttcgtttttgttgtttaggttggagtgtaatggcgcgatttcggtttattttaattttcgttttttgggtttaagcgatttttttgttttagttttttaagtagttggattataggtatgcgttattacgttcggttaattttttgtttgtttgtttttgagatagtcgcgttttgtcgtttaggttgtcgtgtaggggtacgatttcggtttattgtaatttttatttcgcgggtttaaacgatttttttgttttagtttttcgagtagttgggattataggcgttgttattacgttcggttaatttttatatttttagtagagatggggttttattatgttggttaggttggttttaaatttttaatttcgtgatttgttcgtttcggttttttaaagtgttgggattataggcgtgagttatcgagttcggttttaggtttttttttttatttttatagaatgtagtttgtttggtttatagttttttaaaaattgtattagttgttaaagttttagaatttggagatattatattaaaaatttagattttttggggttaggcgtggtggtttacgtttgtaattttagtattttgagaggtcgaggcgggtttattacgaggttaggagttaaaaggttattttgattaataaggtgaaattatgtttttattaaaaatattaaaaattggttagatgcggtgtcgggtgtttgtaagtttagtattttgggaggttgaggtgggtagattgttt

SEQ ID NO: 527 - DNA, 2195 bp, Artificial Sequence
  chemically treated genomic DNA (Homo sapiens)
cgagttttttattttgcgtttttttcgcgttttttttattttaaattttagtagcgtcgttgtttttttcggaaataagttcgttgagtaaaggcggaggaaaattttgggtttttcgttttgattggttttttttcgtcgagcggggcgaggtagcgattggttgtcgggcgttgttagtcgtcgaggttagagttatcgtcggggaagcgtagtcgggttcgggtgtttcggttgtcgtcgcggttgttcggttagtgtagttgggcgagttcgcgcgggcgtcgtcgtcgtttttgttgttgtttatttcgtcgcgtcgtcggcgttgtcggttttgtaggcggtcgtcggggaggggcggtcgagagagcggagtacgaggaggcgggggcggtagagaagtgatgttggcgtcggggatcggggtagcggtagcggagtagtagtattttcgggattttggttgtagcgtttttgtggttcgcgcgttagtttagcggtcggagattacgcgtttcgcgggtaaggttttgttcggtagcgttcgcgacgttttcgggacggttggcgtggtttttgggggttacgaggcgcgtggtggtcggggtatttcgacgaaggtgttgggattcggattgcgtgtttcgacgttgggttgtgttattgttcgcgttcgtgcggttttagttggtgcgttttttttttcgcgtttatagattttgatagcgcggggatggtattgtgtgagtgtggatgtggatgcgtgtgtgcgcgcgcgcggtttggggtattttgtagcgagaatagtgggttttttttgcgtggttcgacgttttttaaggatttaagttgggttggagtgagtaggatgttgttggttcggcgggaggtagaacgtacggagcgtacgggaaagtttatcgtggttcgtaaagagtcgagtaaattgaattttattgcggtgattaaaaggagttgtggatttggcgcgttaggggagaggcgcgttttacgaggttttttaaagttttattttgtttcggggatttcggaggggaagggaagagagggaaaagtaattgttggtttatattgttgaagaaaaggaggaaagagaagttgggggtgggggtgggggtggaggttatttttgggggagtggcgatttttaggtgtttgaagtttcgcgtgggaggtttgttatatttttttggagcgtagatttgaggatggagagttttattttgaggtattggtagcggttttttttgtttggtggcggcgtagggcgtagcgggatagtttggtggaggtagagcggggtttcgacgttcgacggttcggcgtttaggtggggttattgtttttttaggtcgttttggttcgttgattttttaggttgagattcggtttggtgcgtttttggtagttgttaaatgtttggcggtttcgtttttcgataaagtttaggttcgttggggtttggtttattagatttaggatacgttaattacgtagagtaattaggttagggtatttagttgtttttagagcgtttttgttttatattagattattttatttgataaagttgttgagagttttattcgtgttgtaaagtttttcgtagaaggcgaattttttgcgttgttgtaaatggatggtgttattgggttagattcgaattttcgtagtttagtgtagtgggttttttatttttgtttaggacgtataaatttatttttggcgattgttttttatgtggttttttgttttcgtgggagtatttgtttaggaaagtttttgaaatattttaatattaaggagttttttttattgttttagatggggcgaggtttcggtatttgattggcgttggggttgtagtagggaatggaggtggaatattagttttttgtttgttagttttggtaaaataaaaattggtttaatatagggaggcggattttgaattggggatagtattttttttgttatgtagtttcgtaattttttttattagagggattttttgttttaaaataaaataaattataatataataaaaatatttaaaattaaatcgtagaaattattttgattgggtttatttttgatttggtaaattagagaaaatgaaagtaaggtacgtaatagaaatgttatagaaaattaggagggagttgtttaaa

SEQ ID NO: 528 - DNA, 2195 bp, Artificial Sequence
  chemically treated genomic DNA (Homo sapiens)
tttggatagtttttttttgattttttatagtatttttattacgtgttttatttttattttttttggtttattaaattagaaatgagtttaattaaagtggtttttgcggtttggttttgggtatttttgttgtgttgtgatttgttttgttttgggataaaagatttttttagtgaaagagattacggagttatataataagaaaaatgttgtttttagtttaagattcgtttttttgtattgagttaatttttgttttattaaagttggtaggtagggagttgatgttttatttttattttttgttgtaattttaacgttagttaagtatcggagtttcgttttatttgagatagtggggagagttttttagtattgaggtattttaagaatttttttaagtagatatttttacggagataaggagttatatagaaaataatcgttaagagtaagtttgtgcgttttgagtagggatggagaatttattgtattgaattacggagattcggatttggtttagtagtattatttatttgtagtagcgtaaagaattcgttttttgcggaaggttttgtagtacgggtggaatttttaatagttttattaaataagataatttaatatgaaataaaaacgttttggaggtagttgggtattttaatttggttattttgcgtggttaacgtgttttaggtttgatggattagattttagcgggtttgaattttgtcggaaagcggagtcgttaggtatttggtagttgttagaggcgtattaggtcgggttttaatttgggaggttagcgggttaaagcggtttggggaggtagtggttttatttggacgtcgggtcgtcgggcgtcggagtttcgttttgtttttattaagttgtttcgttgcgttttacgtcgttattaggtaggaggagtcgttattagtattttagagtgggattttttatttttaagtttgcgttttagaaaagtgtagtaagttttttacgcggggttttagatatttaaaagtcgttatttttttaagagtaatttttatttttatttttatttttaattttttttttttttttttttttagtaatgtggattaatagttatttttttttttttttttttttttttcgaagttttcggggtaaagtgggattttggggagtttcgtggaacgcgttttttttttggcgcgttaggtttatagttttttttaattatcgtaataaagtttaatttgttcggttttttacgagttacggtggattttttcgtgcgtttcgtgcgttttatttttcgtcgagttaatagtattttatttattttagtttagtttgggtttttgaaggacgtcgggttacgtagaggggatttattgttttcgttgtaaagtgttttaagtcgcgcgcgcgtatatacgtatttatatttatatttatataatgttattttcgcgttgttaaagtttgtgagcgcggaagggagaacgtattagttggagtcgtacgggcgcgggtagtagtatagtttagcgtcgggatacgtagttcgggttttaatattttcgtcgggatgtttcggttattacgcgtttcgtaatttttaaagattacgttagtcgtttcgggggcgtcgcgggcgttgtcggatagaattttattcgcggggcgcgtggttttcggtcgttgggttggcgcgcgggttatagggacgttgtagttagggtttcgaagatgttgttgtttcgttgtcgttgtttcgattttcggcgttagtattatttttttgtcgttttcgttttttcgtgtttcgttttttcggtcgttttttttcggcggtcgtttgtaagatcggtagcgtcggcggcgcggcggggtgggtagtagtagaggcggcggcggcgttcgcgcgagttcgtttagttgtattagtcgagtagtcgcggcggtagtcgaagtattcgagttcggttgcgttttttcggcgatggttttggtttcggcgattgataacgttcggtagttaatcgttgtttcgtttcgttcggcggggggagattaattagagcggaaggtttaaggttttttttcgtttttgtttagcgggtttgttttcgggagaggtagcgacgttgttggggtttgggatgggggaggcgcgggaggggcgtaggatgggggattcg

SEQ ID NO: 529 - DNA, 2463 bp, Artificial Sequence
  chemically treated genomic DNA (Homo sapiens)
tgtatagttttttagtataagtaatagtagtttaattttaagaaaaagatattttaaaggtcgtatattaaaagttgttagggatttagtcgtttatattttatgaaaagtatagattatattcgtttagttagttgtgtattttaattggtcgagaaggcgcgttgggggttgggtttgagggtgagtaaaaggtaagattattagtttgggttgacgtgggggttaaggggagagtagaggaataatttgtaagatttgagtttcgaagttttttgggttatggaggttagaaaagggtttgttaaagttaggtttaagtttcggtaaggtggaattgggaaaaaaaaaaaagaaagaaaaaaaaaacgaaattcgaaaaaataatagcgagtaggttttcgagttttagcgtttatagtgaagtcgttaaacgtagtaggaaagtaggcgtgtgtttttttttttttttcgtttttttagagattcgagtttagttttttttttttatttttattttagtcgagtttaatggttgttttcgtcgcggagtcgggtcggaagacgtttcgttttttcgtcgcgttcgttttagggaattttttcgttttattttttttgttcgatgaggggtagtggttgtcgtcgttacgtgtgttggtagtcgttaagtgaggtcgtttttgcgacgcggtgatagttaaatggtgcgataggaggagttgtagtcgcggtcgtagcgttcgtacggagaggtttgaggcggtttttggcgtcgtttagagggagcgattagacgaatagttcggtgagggcggcgagaggaagttcgttacgagtgttttagtttttcgtcgttttcgatgaatcggacggaataagtcgcgtttttagtaggggttgcgtttttatgaatttttagttgttttttttttttttttttttttttttttttttatttttatttcgagtttcgtttcgtttttttttttcgttagaggcggtcgcgtttaggtgcggagtttatatcggagcgtaatggcgtttaatttcgaacggggggagattttgtttacggaattgtaggtaagggtcgcggttttggtgagaggcgttggcggaggagatagggagagagtttcgcgcggcgtcggggatcgaggaaagttttgcggtcgtcgcgtttttagttcgttaagtgcggaaatttcgggatgttattcgggaaatgtttttttcggggaatcgtttttttggggagtcggattttttttttcgttaaagttttggtttgttatcgttttggtttgattttgtttattagaggggattttatttttgtagttttgttgtagcgggagtttgttttcgtttggttttcggagaggtcggttcgtcgttttttttttcggtgttagagttattcgcgaacgtttttgttgtttttttttttcgcgcggtcgggtttcgtttcgtttttttttcgtatatcgttttttaaatttttttgaatgatttttaagttgtttttttgtttttttttttttttttagatttcgtataaagagcgtttttataatttttagtttttagataagtttttttaaaaaacgagttttattaaatgtttgttttattttagtagttttttttaggtgatagagttttttttttttattttgagggttattttttttttttttttttttttttttttttttttttaatcgagtgataaatatagggtgtttttttttgttatttttgtttagattcgggagtttagatgttgatgttttttagatttttatttttttttttatttgagtattagagaaagagttaataagttgtttattaatgagaaagtagtcgattaagggaaaatattgggtattatatgtttgtaaaagatgagagtaaagtagatcgtttagttaagttatgtcgagtagtaatgttattttttatttttagataaatatttgataatgtaggtacgattttttttagatttttatggtgtatatggggatttaagttattttgtcgggttttttattatttgggagtgttttagagatgtttgttttttgatttaaaagttattttgttttattttaatatagttattttttagttatttaaagattgtagatgggaattaggagaaaaaaatagtatgtttgtatttttttttgtgtgttggatagttaattttttttaaaaaaaagattaaattaagaaattttgaagagttgatgttaaaattaagtattgtaattgtatttaaattttttgtttaaatatattttttaagaaatttttttataagtttggttttttgtgtagttagacgtaagtttgaaaattttggtataatggttgatattttttttataaaaatagagattttaataatgtatattaatgtagtgttgtatatttagaattttttggtaa

SEQ ID NO: 530 - DNA, 2463 bp, Artificial Sequence
  chemically treated genomic DNA (Homo sapiens)
ttattaaaggattttaaatgtgtaatattgtattgatatatattgttaaagtttttatttttgtggaggaaatattaattattatattaaagtttttaagtttacgtttgattgtataagaaattaaatttataaagagattttttaaaaagtatatttaaataagaaatttagatgtagttgtaatatttaattttgatattaattttttagaattttttgatttagttttttttttaaaaaaaattaattgtttaatatataaaaagaaatgtaggtatgttattttttttttttaatttttatttataatttttgagtagttaaaagataattatattaaaataaagtaaaataatttttaagttaaaaaataaatatttttggaatatttttaagtaatgaaaaattcgatagggtagtttaagtttttatgtatattatagagatttaaagaaaatcgtgtttatattattaaatatttatttggaaatgggaaataatattgttattcgatatgatttaattaagcgatttattttgtttttattttttgtagatatgtggtgtttaatgtttttttttagtcgattgtttttttattagtaaataatttattagttttttttttggtgtttaaatgagagggaaaatgaaagtttgaaaagtattagtatttgagttttcggatttgggtaggggtagtagagaaaggtattttgtatttattattcggttaaaaaaaaaaaaagaaaggaaaagaaaagaaaaagataatttttaaaatagaggaaagaaattttgttatttgaagagggttgttgaagtgaagtaaatatttggtgagattcgttttttaaaaaaatttgtttaggggttggaagttatgggggcgttttttgtgcggagtttgaggggagggggagggataagaaaatagtttgggagttatttaaaggagtttaaggagcggtgtacggaggaaaggcggggcggggttcggtcgcgcgaagggagggggtaataggggcgttcgcgggtagttttgatatcgagggagggggcgacgggtcggttttttcggggattaggcgagagtaggttttcgttgtagtagggttgtagagatggggttttttttggtaggtagaattaaattaaagcggtggtaggttagggttttggcgggggagagggttcggttttttagggaagcggtttttcgagggaagtatttttcgagtgatatttcggagttttcgtatttagcgggttaggggcgcggcggtcgtagggtttttttcggttttcgacgtcgcgcggggttttttttttgtttttttcgttagcgttttttattagggtcgcggtttttatttgtagtttcgtgagtagaattttttttcgttcggggttggacgttattgcgtttcggtatggatttcgtatttggacgcggtcgtttttggcgaagggagaaggcgggacggggttcggggtgggggtgaggagaggggagagaaagaaaaaaaaaaaaataattagggatttatggaggcgtagtttttgttggaggcgcggtttatttcgttcggtttatcgagagcggcggggagttagggtattcgtagcgggttttttttcgtcgtttttatcggattgttcgtttagtcgttttttttgggcgacgttaggagtcgttttaagttttttcgtgcgggcgttgcggtcgcggttgtagttttttttgtcgtattatttggttgttatcgcgtcgtaaaagcggttttatttggcggttgttagtatacgtgacggcggtagttattgttttttatcgggtagggaaggtggggcggaggggttttttagggcgaacgcggcgagggggcggggcgtttttcgattcgatttcgcggcgagggtagttattggattcggttggggtgaaaatgaggggaaaggattgggttcgagtttttggggaggcgggaagaggaagaaaatatacgtttatttttttgttgcgtttaacggttttattgtgaacgttagaattcgggagtttgttcgttgttgttttttcgggtttcgttttttttttttttttttttttttttttttagttttattttgtcgaaatttgggtttaattttaataggtttttttttaatttttataatttaaagagtttcgggatttagattttatagattatttttttgttttttttttgatttttacgttaatttaaattaataattttgttttttgtttatttttaaatttagtttttagcgcgttttttcgattagttaaggtgtatagttagttaaacgggtatggtttgtattttttatgaaatgtaagcggttggatttttggtaatttttaatgtacggtttttaagatgttttttttttgaggttgaattattgttgtttgtattggagaattgtata

SEQ ID NO: 531 - DNA, 2297 bp, Artificial Sequence
  chemically treated genomic DNA (Homo sapiens)
agaaaaatattatcgtgttttttcgtttgtatttaatatatttaaggttttttatttatttttttggaataaatttttagtaaatatttatttatcgatttgggagcgatggatttttataaaggtttgatcgttttttaagtggtcgaagtgatttgttttcgtggtttttttagtattgaagggggtgggggaagcggatttgagggggtgtatgtttttgtcgtcggtgggtttattttttaaaaattattgagatgcgttagggtggtcgtgattaagcgggtttagggttaattgtgtgagggggaagcgttttttagagcgcgcgtagcgtcgggggtttagtttacgtcgttgcgcgtttttgtgcgtatcgggtgaggatgtcgagttttgcgggtatttcggaagtcgcggtggaggtaggggtttcgttcggcgtagtgggtttgttggggaggtgtaggggaggttttgatttttggtttatttttttttagattttttcgttcgttttcggatttttagggtttttttttaaatttttttttgttttttttacgggaggtttttgtagtttttgggttttagggtttcgtaagtttcgggatcgatttgtgttcggggtgggtgtggcggaagtttgaatcggattatttaggtacgttatttgtagacgtagtgggcgagggggattttgttatttttttagttttttttttggatttcgtagcgaggggaattaaattttttttatgatagtttttttggcgttagtttggatcgagtggttataggttggattagggtaggtagaagatgtatttggtattttatcgaacggtatttgaattcgtttttattatttattaatggcgtgattttaggtaatttatttaaatttttcgaattttagcggtttttatttataatatgggggttaatgataatgtttttttcgtatgtaggtggattaaatggatataaagcgtttattttcgttcggtacgtttaaaatttttattaataggttagttaattttattacgagaggaattttttttttttcgttttttagagtgtgggcggtatgaggttacggaagtagttgttgtaattagtattttaaaatttagagattttttaatggtggtagggggtgaaagggtaggggggaggtagggttgggataggtagaggtaggtttttggggatttttagttttggggattaagcgtttggaattagttgggtttgggtagaaataagaaggtaaatgacgggatcgtcgtcggagttcggatttttatttttggagtttattgttttttttagggaatagaggagtgttttggttttttagtaatgaattaggagagtgtgagaaagagtatttgttttttttttcgtggttcgataagttatttttcggtagttttgcgagtagattaattgaaacgggtttggaattttatttttttttttcgatggagttgttggaggtttgcggatattgtttggttagttttcgggattatagcgtcgtgggttttttttcgtggtgtttgttttaaatttgggtgttattaatttatttaataatgacggatgattttgttataacgacgttagttaaaatattttcggtttaatttttttttaattaatatcgaagtattttgaatgagattcggatgaagtttgaatagtacgttttttaggtttagaaaatttgagtggtgggaagagaaaaagaaataagtagaaattaggaaagaatggttattaattgtttagattggtaagtgttaaataagttaggttgtttggaaaaagataaatgtcgttttttttttttacggtatggttagaatttcggcgatgggaaagtattttttgagtcggttaattttatatattttgtttgtgttttttattatttattatcgaaaatgttaggaagagttggggggtaagtgtttttttcgtgggtgcgagattgtatcgaagggttgttttggtataaagtttggggagaggatatggtggaggtggggttgtatttttattttgtttttttaatattaggttttgggtagagaaatttatgcgtgattttttgcggtagtcgtaggtagttgatcgtaaatagtttcgttcgtgtttcggagtagttgtgttattagacgtaatattggatatttgttttcgggttttaagaaggagagggaaagagttttttagaagataattcgagaaggggttagtagagcgttgggtggagtgtagatttt

SEQ ID NO: 532 - DNA, 2297 bp, Artificial Sequence
  chemically treated genomic DNA (Homo sapiens)
ggagtttgtattttatttagcgttttgttgattttttttcgggttgttttttggagggtttttttttttttttttttggggttcggagataagtatttagtgttacgtttggtggtataattgtttcgggatacgggcgaggttgtttgcggttagttgtttgcggttgtcgtaggaggttacgtataggtttttttatttaaaatttggtgttagaggggtagggtgggagtgtagttttatttttattatgttttttttttagattttgtgttagggtagtttttcgatgtagtttcgtatttacgaaggaggtatttgttttttagttttttttggtattttcggtagtagatggtagagggtataggtagggtgtgtgaaattgatcgatttaggaggtatttttttatcgtcggggttttggttatatcgtaaagagaagaaacggtatttatttttttttaaataatttaatttatttagtatttgttaatttgagtaattaatagttatttttttttgatttttgtttgtttttttttttttttttattatttaagttttttgaatttgggaaacgtgttgtttagattttattcgggttttatttaggatgtttcgatgttggttggaagagagttagatcgaaaatgttttgattggcgtcgttatgataaggttattcgttattgttggatagattgatagtatttaagtttaaggtagatattacgagggaaagtttacggcgttgtggtttcggaggttaattaggtagtgttcgtagatttttagtaattttatcgggaggagaggatgaagttttaggttcgttttaattaatttgttcgtagaattgtcgaagagtggtttgtcgggttacgggagaagaaataaatgtttttttttatatttttttggtttattgttgagaaattaggatatttttttgttttttgggagagatagtgaattttagggatggaagttcggatttcggcggcggtttcgttatttgtttttttgtttttgtttaaatttagttagttttaagcgtttggtttttaagattggaagtttttaagaatttatttttatttgttttaattttgttttttttttatttttttattttttgttattattagaaagtttttggattttgaaatgttagttgtagtagttgttttcgtggttttatgtcgtttatattttgggaagcggaggagggagggtttttttcgtaataagattagttgatttgttaatgagagttttggacgtgtcgggcgggggtaggcgttttatgtttatttaatttatttatatgcggagaaggtattattattaatttttatattgtagatggggatcgttgaggttcggaaagtttagatgggttgtttaaggttacgttattaatgagtaatggagacggatttaaatatcgttcggtaaggtgttaagtgtattttttgtttattttagtttaatttgtagttattcggtttagattgacgttagaggggttattatgggagagatttggtttttttcgttgcggggtttagggaagaagttgagaaggtagtaaagtttttttcgtttattacgtttataggtggcgtatttgggtaattcgatttaagttttcgttatatttatttcgggtataagtcgatttcgaggtttacgggattttaaggtttagaggttataggaatttttcgtgaagggggtaggagaaagtttgagggagagttttgaaggttcgggagcgaacgaaaaagtttggaagggaatagattaggagttaggattttttttgtatttttttagtaggtttattgcgtcgagcggggtttttgtttttatcgcggttttcgggatgttcgtagagttcggtatttttattcggtgcgtataagggcgcgtagcggcgtaagttggattttcgacgttgcgcgcgttttgaggggcgttttttttttatatagttgattttgggttcgtttggttacggttattttggcgtattttaatagtttttagaaagtgagtttatcgacggtaaggatatgtatttttttaaattcgttttttttattttttttaatattgagaagattacggaaataaattatttcgattatttagaaagcgattaaatttttataaaaatttatcgtttttaaatcgatgggtgaatatttgttgggaatttgttttagaggaataaatgaggagttttgagtgtattaaatgtaaacggggggatacggtggtgttttttt

SEQ ID NO: 533 - DNA, 2177 bp, Artificial Sequence
  chemically treated genomic DNA (Homo sapiens)
gtggttaagagtattaatagaggtttatatagtattaatttaagtatttaagttataaattaagataataaattgttaaataaaatatgatttgtttttttattttgataaatattttttatacggagttggatggttagttgtgaattatgaatttttggatttttttaagggttaggttggaaggtgttatggaggataaagttgatcgcgaatgatttttttttttgtattacgaggggtttaaagtatttgggagtgtatattttagtttataggtttaggtattgtttatattttaaagaagagttattttttggatataggagtgagtttagagtttcgattagattttgaaagtgaatttggtattatttgggtagagtagtttagagttttgattatatggagcgtatgtagtttagaagagggttaggttttagttgggttattagtttgatcggaagaggggtattgttagaggagagttagagggtggttgtgggcggaggttttttttgggtttaagagttagtttgattatatagtttttaaaattattttaagaaagaataatatatcggaatatttatgtgacgggtaagtatggtttagtggttatgagattaggttttgtaggtaaatttttgggttggaattttaggttggttattttttagttgtggtatcgtaggtaaattattgattattttatagttttagtttttttatttttaaaatgggtaaataattattattatgaggagtggtagtatatgtaaaacgtttggtggatattatatattgggtggatgttgatagggttttttttagtttaggcgagtttgtttttgagaggtttttttggagaattatataagttttataatatttaagtattttgatagttaaggtgaaagttttttttttttattaaattggggtgaggcgcgggtgtgggtattatttattttatttaaggtattaggggtagtttacgtttcgttcggttttgtgtttaaggattttacgttgtagacgtgtacggaagttgttttggttaggggtttggaggttaattagtaaacgtagcgtgagttacggcggtattaggaattgaaatcgtgttagttatgtttaggtttatttttcgatgcggacggtgaaattagggagtagtgatattaggacggggagttagcgttgacgtagttttatcgtttttttttttatttcgtattcgtcgtcgtcgagtttagtttgtagataggttttgatatttttttttagcgaggagcgagggagtcggaataagtcggggtattttttttgtatttttcgggagcgttagtttagttaagtttagcgattgttcggttcgttagcgaagacgttttttttgaagtaagtttggatatttttttattttttcgggtgaaacgaattttaagtggtttatttcggtttttcgtttttttttattttttgtaaaaaaatttggtaattttgcggttttttgcggattaaaatttgtaattagttttttgtgttttttttaaggggtagtcgtgattggaaatcgaggagttagattttttcgaaaatattaataaagaattatatttagttttgagtttttagtttaaatgttttttatttttttatttttattttaaaacgttagggttggggaagtgggaggtagagggtgggggagtaacggagaaagaatagttgtgttttcgttttttcgtttaatttttataaataattaatcgcgagcggaggttattttttagttaatgaagcgttttaaattgataaagttttggcggtagttaatgaataatatttaggggtgttagattcgcgtttcgagattaatgagtgtagagtttgggagaggtaatttgagttagagtgtgggtgtgtggtgtaaaagttttttatttttaagtttaaaaatttgttttgcgattgagtatgttttgaattaattgcgggcgttttgagatttttggattgggatgtaattcggttttcgggttttgatcgtattcgagcggggaggtgggtacgattcgcgggattttgtttcgagagagttgtaggtattagaagttattttttttttagtcggaatagtattttagatttggagtattttttgttttttt

SEQ ID NO: 534 - DNA, 2177 bp, Artificial Sequence
  chemically treated genomic DNA (Homo sapiens)
aagaaaataggaggtattttaagtttgagatattgtttcgattaggaaaggggtagtttttggtatttgtagttttttcggggtagggtttcgcgggtcgtatttattttttcgttcgagtgcggttaaaattcggagatcggattatattttaatttagaagttttagggcgttcgtagttagtttagggtatgtttagtcgtagagtaggtttttgggtttggaagtaggaagtttttgtattatatatttatattttagtttaaattattttttttagattttgtatttattggtttcggggcgcgagtttgatatttttaagtgttgtttattggttgtcgttaaggttttattagtttggggcgttttattggttaaaaagtagttttcgttcgcgattggttatttatagagattgagcggagaggcggaggtatagttgtttttttttcgttgtttttttattttttgttttttatttttttaattttggcgttttgaagtaaaagtgaaaaaataagaggtatttaggttgagagtttagaattaaatatagttttttgttggtgttttcgagagggtttgatttttcggtttttagttacgattgttttttaaagggagtataaagggttaattataggttttggttcgtaagaaatcgtagagttgttaagtttttttgtagggagtgggagggggcgaggagtcgaaatgggttatttggaattcgttttattcggaggggtaggggagtgtttaagtttgttttagaggaagcgttttcgttggcgggtcgggtaatcgttagatttggttgggttggcgttttcgggaggtgtaagggagatgtttcgatttgtttcgattttttcgtttttcgttgaggagggatgttaagatttgtttgtaggttgagttcggcggcggcgggtgcgggatggggagggaggcggtggagttgcgttagcgttggtttttcgttttgatgttattgttttttggttttatcgttcgtatcggagggtaaatttgggtatggttaatacggttttagtttttagtgtcgtcgtgatttacgttgcgtttgttagttaatttttaaatttttggttaaagtagttttcgtgtacgtttgtagcgtgaagtttttgggtatagaatcgggcgggacgtgggttgtttttgatgttttgggtggggtgggtggtgtttatattcgcgttttattttaatttagtagagagaggagatttttattttgattgttagagtgtttggatgttatgaagtttatataattttttagaaaaattttttagaggtaaattcgtttaagttggagagaattttgttaatatttatttaatgtgtaatgtttattaagcgttttatatatattgttattttttataataatgattatttatttattttaaagatgaggaaattgaggttgtgagatgattaataatttgtttgcgatgttataattagaaagtggttaatttaagattttaatttagggatttgtttgtagagtttagttttataattattggattatatttattcgttatatgaatgtttcggtatgttatttttttttagggtgattttagaggttgtgtgattagattggtttttaaatttaagagggattttcgtttatagttattttttggtttttttttggtagtgtttttttttcggttaggttgatggtttagttggagtttgatttttttttagattatatacgttttatgtagttagaattttggattgttttgtttaaatggtgttaagtttatttttaggatttggtcgggattttgaatttatttttgtgtttaagaaatagtttttttttggggtgtggatagtatttggatttgtgggttaaggtgtgtatttttaggtgttttgggtttttcgtaatgtaggaagagggattattcgcgattagttttattttttatgatattttttagtttggtttttagagaagtttaggaatttatagtttataattggttatttagtttcgtgtaggaggtatttgttaaggtgggaggatagattatattttgtttaatagtttgttattttgatttatgatttaaatatttaggttaatgttatgtgggtttttattggtatttttaattat

SEQ ID NO: 535 - DNA, 2590 bp, Artificial Sequence
  chemically treated genomic DNA (Homo sapiens)
gcgttgagtaggcgcggttacggtgtttagatttttcgggggtattttagttttcgttatttagtggtttacggttgcgggttttagggtttgaggttggggattatcgttgtcgtcgtagtttttatatttcgaagttgttttgttgtttgtgttgttttcgtagatagtatttttggcgttttgtgcgtttttttttttttttttttttttttattcgtttttattgttttgagtttttgaaagttgggagaatcggagatatttttgaggattggtaatgaagttttatttaagtgggatgtaattttcgtttttttatttttttttaagaaggaggttgtgtttttattttgttttgttttgggtgttgatttttaaaaaattagagtaaaatgaacgtgaataaaaagaaaaggagaaatgtttcgagttggggtagagggagtagagaaggagtttttatcgcggtcggaatgtagagcggattttggtttaggattgggtttttttttaggttcgggtttattttggttttcgttgttggaatttttaggaggtaaagcgatttcgatttttgttgttcgtattttcgggcgtgagtgttttttttaggaggtttaggaggtcgtttttgttgtattttgagttttcgttgtaaaaattgaagttcgtgggtttcggtaggttttttagttcgttcgtttcgggataggttttcgtttatatttttggaagtaaggagtttcgggttttttcgtttttttcggggtgtggagtttttggggtttttgaaaggtgaggttttagaggcgagggaggggtgagcggggagttttgttcgtttgcggttgcgttttcgttgtggattaggaggtaggttaatttttcggattttgggggaaaaattatagcgggttttttgcggaaattttggtcgttttaatttgttaagagtttgagtgaggttttggaagtttttagtttcggtttaggtcgggacgcggttgttgagtttttttaggttcgtaggatagcggttttcgtcggtggcgtcgttgtatttaggttttttttagatcggtggcggtagttaattcgagatttgcgtttttcgggttcggggtagttaggaggtcggcgcgtagcgggtcgggttaggattgggtcgagtagatagagttgtagttttcgttttgttcggtttttcgcggttggagagtagagcgatgttattcggagtttcgtttgggtggtaacgagattttggttagttatttttgtagtttagattaattttttttaatagtttttgatggtaattatagtaatcgaagttgttatatatttttaggtaattatgatatataaaaagtttcgaggggattttttggcgagggaagttaagaacggttttttagttttaggaaatttcggttcgttttacgtcggagttcgttcggtttgttaaatgagaggagttttgtaacggggttaattagtttgtttcgtgattttaagttattttaacgtggttgggtggcggagtttgaggtataggttcgttatgtttcggaattttcgcgttttttttttttgggtttcgttttagttcggttgtttgtttttaatttgtttcgggagtcgcggtttagaggtttgtttagaggtaggattcgtattggtggtggtttagagggtaatagttcggaagttcgggcgggggaattcgaggaggggtttttattttgtattggttttttttttatttttatcgggttttttagagatgttgttatgggttttttgttcggatgggaagtggggaaaaagagattttattattgttttttttatttatttattttggtatttttaatagtgttatagggaagaggatagttggggtgatagtattgttgggttttaaacgtggattttggagcggttagagggcgcgtgttaagtagaggatggttgtaagatatggaaattaagtttatcgtttttagagtgagtgtagtgtagcggagttttagattcggtttttgagcgattaggaatttttttgggcgtagtgataggttcgaaggagtggaggataagattcgttgtgtttttgtttggttttttttagttttttttttttatagtataattttttttttcgttttgtgggaggggggcgtcgagtcggtggtcgtcgcgtcgcgcgttttttttgttcgtttttgtcgtcgttcgaatttttatgttattttttttgacgggttattggtggttttataggtaggtgttgtcgcggggttgtaattattcggtcgagtttggtcgttatcgaatatttttttatttttaagtacggtttttcgcgtttttttttttttattttttttatttgagacgagtttgggatttacggtgtaagttcgttcggacgtttcgggttttaggagtaagtttatatttgcggtgtttcgaggtttttttcgcgttacgtttttattttttttatttttttcgtttagacgttttattgtcgtttttttttattttaattttatcgtagtttttaatttaagcgttttcg

SEQ ID NO: 536 - DNA, 2590 bp, Artificial Sequence
  chemically treated genomic DNA (Homo sapiens)
cgaaagcgtttgggttggggattacgatgggattgaggtgggaaggggcggtagtggaacgtttgggcgaggggagtaggggaggtgagggcgtggcgcggggagggtttcgaggtatcgtaggtgtaaatttgtttttggaattcgaggcgttcgggcgagtttgtatcgtgggttttagattcgttttaggtggagggggtgggggaaggagagcgcgggggatcgtgtttgggggtgagggggtgttcggtaacgattaggttcggtcgggtaattataatttcgcggtagtatttgtttatagagttattagtgattcgttaaaaagagtagtatgggaattcggacggcgataaaggcgggtaggggaggcgcgcggcgcggcggttatcggttcggcgttttttttttatagggcgggaggggagattgtgttgtgggagggaggggttggagagggttaggtaagggtatagcgggttttgttttttattttttcgggtttgttattgcgtttaagggagtttttggtcgtttaggaatcgggtttggagtttcgttgtattgtatttattttggaagcggtaaatttggtttttatattttataattattttttgtttaatacgcgttttttgatcgttttagggtttacgtttggggtttagtagtattgttattttagttgtttttttttttgtggtattgttgaagatgttaagatgagtgagtgggaggagtagtggtggggtttttttttttttattttttattcggataggaggtttatgataatatttttggagaattcgatgagggtggagggaagattagtgtagggtgggggttttttttcggattttttcgttcgagttttcggattgttgttttttaggttattattagtgcgagttttgtttttgagtagatttttgagtcgcggttttcggggtagattagaaataggtaatcgggttggggcggggtttaggagggagggacgcgaaaatttcggggtatagcgggtttgtgttttagatttcgttatttagttacgttaaggtgatttggggttacgagataagttggttgatttcgttgtaaagttttttttatttagtaagtcgagcgagtttcgacgtgaggcgagtcggagttttttgaagttggaaaatcgtttttaatttttttcgttagggggttttttcggggttttttgtgtgttataattgtttaaagatatatggtagtttcgattattgtaattattattagaggttgttgaaagaagttagtttgggttgtaggggtgattggttagggtttcgttattatttaggcggggtttcgggtgatatcgttttgttttttagtcgcgagaagtcgggtaaggcgggggttgtagttttgtttgttcgatttagttttgattcggttcgttgcgcgtcgattttttagttgtttcgggttcgagggacgtaagtttcgggttggttgtcgttatcggtttggaaagggtttaaatgtagcggcgttatcggcgggggtcgttgttttgcgggtttgagaaagtttagtagtcgcgtttcgatttgagtcggggttggaggtttttaaggttttatttaggtttttggtaagttagaacggttaaagttttcgtaaggagttcgttgtggttttttttttaaagttcggagggttggtttgttttttagtttatagcgggggcgtagtcgtaggcgggtagagtttttcgtttatttttttttcgtttttgaggttttattttttaagggttttaggggttttatatttcgaaaaggacgaaagagttcggggttttttatttttaggggtgtaggcgagggtttgtttcggggcgagcgagttaggaggtttgtcgagatttacgggttttagtttttgtaacggaggtttagaatgtaatagaaacggttttttgagttttttgggaaggatatttacgttcgggaatgcgggtaataaaaatcgaggtcgttttattttttggagattttaatagcgagggttagggtaggttcgagtttaaagggaaatttagttttgggttagggttcgttttgtatttcggtcgcggtgagggttttttttttgttttttttgttttagttcgaaatatttttttttttttttttgtttacgtttattttgttttaattttttaaaggttagtatttaaagtaaaataaaatgaaaatataattttttttttggaggggggtaggagggcgggaattgtattttatttaagtgagattttattattagtttttagaagtattttcgatttttttaatttttaaagatttaggataatgagggcgagtgaaagggggagggggagggaaggaacgtatagagcgttaaaaatgttatttgcgaaaataatataagtagtaaggtaatttcgggatatggggattgcggcggtaacggtagtttttagttttagattttggagttcgtagtcgtgggttattggatggcgggaattgaaatgttttcgggagatttgagtatcgtgatcgcgtttgtttaacgt

SEQ ID NO: 537 - DNA, 2646 bp, Artificial Sequence
  chemically treated genomic DNA (Homo sapiens)
gggtttttgttaaatgtaagagggatttggttttattgttatttagtcggtcgcgaaggcgttgcggagtttattttcgttttcggttcgagattgcggcggtgcgtattgagtttgcgcgcggggtttttttcgttgatgttgtagatatagagttgagaggttcgggtgttagtagcgggagggttagcgggaaggtcgggttttttgttttggtttcggaggaggagttattatttttggggtgatgttatttttatagattggaaaatattcgttagttttttgatatatatttagatatatttttatttaacgggtatttacgattttttgtagggagagtttggaaatttttgtcgtttttttttttttatttttgtttttgcgttcgtttaaataatcgcgcgttatatttgttcgttgattttattggtgtttgttttgtttaaattattttgtttcgttatttaggtttcgtaaagaatatttatattggatagattttattttttcggttttaaatttttttttgaggggaggtttttaaatgtgtatggatacgttaggcgagttgaagattaagtaaattttagtagcggttttttttttttttcgagatggtaaaaattttttttaaatatttatagttcgttttagtcgttttaattttagtcgggttttttcgtttatagttattgaaataaatgagtaaatggtttagtttaaaaatataattagatttgagatttgatgaggtcggttgcggtggtcgtgaatgaaaattggagaagttttgttttaggaaatagggatagttaagggatataaagttaaaaggagagatgggaaagttggggatattttggtatataaagttgttattaaagtttattttttttttatttagataggtgacgttatattttgttagttattaaaggttgtaggtttttgtttagaaaataatatcgaggtttttaatatgtgtttattttttaggcgcgtatatacggtttattttcgtaagtaagtacgacgataggaatgttaagtatttaaataaagatagatattttttattttttatttatcgtcgtttttgtttttcgtaattatttaaagtttgagtttttaaaaaaggatttttttttagttttttggagtttgatgttttttttttattattgtagttcgttatggttttttagaatagagtggttttttgggcgttcgtaggttttttaggatttcgataattatgttttaattaagattttaaatcgcgaatcggagatatttttcggggggaggaggacgtcgtttgagagggagggagaaggagaaatttattttgatattagtttcgaaagtttttacgcgtgaattgggtattagttaagggaggaggaaatttattagttcgagggagggaaaataagttttttagagaagacggcggtattcgttagggagggggattgggttttggtttaaagaggattggttgggattgggtatattttgagcggtttttggagttgaggttgggttttttcgagcgcggcggttggttgacgttttttttcgtttttttatttcgggtttttttttttcgtttttttttagtgtgtagtttcggcggttcggttgttattgtcgtcgtcgttgtagtagtagcgttagggataagtttgattcgtgagcgagcgagtatttagtagtaattattattttgggtaatttgcgggttttttgttcgcgggtagcgaacgggagatttttattagcggtttagtgttttcgagtcgttgtagttcgaggggcggcgggagcgttcgtattagatttttttagacgcgaaaagggacgagataattgcggaatttattagtcgtgttagggtattttcgaggttataatcgattgatattttttttttttttggtaaattggatttttttttttaagttatttggtagttgtttttgattttatttttttttttattttcgttcgaaagtttttggttttttttcggaaatttagatagaattgggtatttttgttaattgtcgttggggacgttcggtcgtgcgttttcgtcggttaacgtcgtttgtgtttcgagtttggtttgtttatttttgaattgtaaagggattaagtttagtttgagttttttgtattgggaaggagagagagcgtgtaagagagcgagtgggagagggggaaaggggaaaggagaggagggaggagagagaggagggaggagagagaaagggagggagggaggggagggatcgagagagagcggggagagagaggttgtaattttttttttgaatcgcgtatagcgttgtagattttattgtttcgatatgcgggtcgaatgtaggtgagaaaaggtacggattttgcggttgcgaatttaaatttgggtatcgtacggtgcgtattgtttagttttcgttttcgtgggcgaaaggttgttgcggttttaggcggttgtttcgtgattaatgattttgcgtagagttgttaagaaaaaagagaaattcgcgtttttcggggtgagaagggattgattttgggcgtttttgaagatggttcgggtttttttttggcgcgtcggggggattttga

SEQ ID NO: 538 - DNA, 2646 bp, Artificial Sequence
  chemically treated genomic DNA (Homo sapiens)
ttagggttttttcggcgcgttaaagagaagttcgagttatttttagagacgtttagagttagtttttttttatttcggagagcgcgggtttttttttttttttaataattttgcgtaaggttattagttacgaagtagtcgtttgaaatcgtagtagtttttcgtttacgggggcgaaggttgagtagtgcgtatcgtgcggtgtttaagtttgggttcgtagtcgtagagttcgtgtttttttttatttgtattcggttcgtatgtcggagtagtgggatttgtagcgttgtgcgcgatttagggaggagattgtagttttttttttttcgttttttttcgatttttttttttttttttttttttttttttttttttttttttttttttttttttttttttttttttttttttttttttttttattcgtttttttgtacgtttttttttttttttaatgtagggaatttaagttgaatttgatttttttgtagtttaaaggtgagtaaattaggttcggagtataggcgacgttagtcggcgaaagcgtacggtcgggcgtttttaacggtaattaataaagatgtttaattttgtttggattttcgaagaaaagttaaaggttttcgggcgggggtggagggggaggtggagttagagatagttgttaagtagtttaaaaaaaaaaatttagtttgttaaggggagaaaaagtgttagtcggttgtggtttcggaagtgttttggtacggttggtgaatttcgtagttgtttcgttttttttcgcgtttgggagagtttggtgcgggcgttttcgtcgtttttcgggttgtagcggttcggagatattgaatcgttagtgggaatttttcgttcgttattcgcgagtaggaaattcgtaagttgtttaaagtggtggttgttgttgggtgttcgttcgtttacggattaggtttgtttttgacgttgttgttgtagcggcggcggtagtagtagtcgagtcgtcgaaattatatattaggagagagcgagggaggagggttcgggataaggaggcgggagggagcgttagttagtcgtcgcgttcgggaaagtttagttttagttttaggggtcgtttaaagtgtgtttaattttagttagttttttttaagttaaagtttagtttttttttttagcgagtatcgtcgttttttttgggggatttgttttttttttttcgggttggtaaattttttttttttttgattaatgtttagtttacgcgtgagagttttcggagttggtgttaggataggttttttttttttttttttttttagacgacgttttttttttttcggaaagtgttttcggttcgcgatttaggattttggttaggatatggttatcggggttttggggaatttacgagcgtttagaaagttattttgttttgaaaaattatgacgggttgtagtagtgaagagagaatattaaattttagagagttggagaaagatttttttttgggagtttagattttggatggttgcggggggtaggggcggcggtgggtggagggtgaaggatgtttgtttttgtttaaatgtttgatatttttgtcgtcgtgtttgtttgcgggggtagatcgtgtgtgcgcgtttggggaataaatatatgttggaaatttcgatattattttttgagtagaaatttgtagtttttagtaattggtaaagtgtagcgttatttatttggataaaagggaaataaattttaatggtaattttgtgtattaaagtgtttttagtttttttatttttttttttgattttgtgttttttgattgtttttattttttgaagtaaggtttttttaatttttatttacgattatcgtagtcggttttattagattttaggtttggttgtgtttttgaattgagttatttatttatttattttagtggttgtaaacgaagaggttcggttaggattaagacgattgagacggattgtaggtatttggggagaatttttattatttcgaaagagagaaagggtcgttgttgggatttgtttagtttttagttcgtttgacgtatttatatatatttaagggtttttttttaaagaaaaatttaaagtcgaaaaaataaaatttgtttagtgtgggtattttttacgagatttgggtgacgaggtagaatgatttaaataagataaatattaataaagttaacgagtagatgtagcgcgcggttgtttgggcgggcgtaggaataggaatgaggagggagaggcggtagagatttttaagttttttttataggggatcgtagatgttcgttggatggaagtgtgtttaagtgtgtgttagggagttggcgagtattttttagtttgtgaaagtagtattattttaggggtggtggtttttttttcgaggttagggtagggaattcggttttttcgttaattttttcgttgttggtattcgaattttttagttttgtatttgtagtattagcgagaaaagtttcgcgcgtaggtttagtgcgtatcgtcgtagtttcgagtcgggggcgggggtgggtttcgtagcgttttcgcggtcggttaagtggtagtaaagttaaattttttttatatttggtaagaattt

SEQ ID NO: 539 - DNA, 2372 bp, Artificial Sequence
  chemically treated genomic DNA (Homo sapiens)
gtattgttttttatatttttattcgttatttatatagtgttgagatttaggatttttattttttttttttgtttttatattgcgtgagaagtaagatagtttagatagattgttagtaaagtttagggttttttgtttttttgtttttgtatggtattttaataagtttaaagtataacggataagttagaatttggcgatgtttggagtttgtttcgggtttttgtgaaattatagtgttggaatattaggggttttgtaaatttttgttgataatagggaaggttaacggtatgtttgacgttaattgtaggtaggtggtggttttagttatttagggagggtttagtgtagagtttttcggtggataggtttagatttagattttttggtaaggaggtaaaacgaggcgggagtagggattatcgtgcgttgtttttaggttatttcgtatttgttgtcggttttttttaggttttgcgcgggattcgaggtttttggttagcgtttttttatgtttttttagatttcgttgtttttagtttggcgttttttagagtttcgcgtcgttagggcgtatttattttttttatcgcgttgcgtaatttgtgttgcgtgttttttattagttttttaatttcgcggaatattttattgagggtggtttttttttgcgggtagttgagagtcgggtcgggtttgattggagtcgaggtcgtcgtcggagcgggcgcgggggtcgtggggatcgtcgtcgttagtagtaggtatagtagggtggttttaagtcgttgtattttcgttttgcgttcgtagtcgtcgtttgtgtgtttcggaacgcgattagaggcgcgcggattatttttttcgttgggttcgtcgtttcgtttcgtttcgtttcgtcgttcgtttttggcgtttttttttttcgtattcgttcggagacgggaggaaatcgaggtttttgaaaacgtagtttttttatattcgaaaagacgcgattttattcgttttagttcgagtttcgatcgttttaggatttcgtatttttattttcgagtataagttgagttttgttttttatttgtgatgttggagttttcgttagagtaatcgaattcggattttttacgttaatagtttttaagttttagtttatttagattttgttttcggtttaaattttagttttttttcgattaggttagagtgttcgatttttatttttattttaagttttttttagtttttatttggggtggattaagtataggttagttttttttttttggcgtcgggttttattcgagcgtttcgttttatatttattaagagaggttgagtttagtagagtcgttttttttttcgtcgtcgttttttatttatttcgattggatcgagttgcgttgcgggtcggattggatttgttcgttttcgtcgggaggtcgtcgggttgcgggtgtagatgcgggagcggcgcggtgggcgggtcgcgggtgcgggagcgcggcggggtgcggtagcgtcggtattcgagggagttcgtaagacgcgtttcgttcgtttattaggtttttttttcgttttcgtttcgagtttcgttcgtttattaggtttatttcgtttcgcggaggggtcgtagttcggttattggttagtcggggcgtcggttattttacgttttacgttttacgttttttttttttgttttagcgattagttttatcgaaggtagttattttttttattgtttgtttttgcgttcgcggtattttaggttcgttttttttggtttttaggtttgtaatagtttatcgaggttgggggtagggggaatgttttttagttttattttggtttttttaagttaatttttgttttgtgaaatttttaggaaaaattttagtttttagtttggtatttaagttattatcgttggttttagtttgtcgtgattgatatcgtgttttagttaggataacgtatttgtagtttttggaatgggagaacgttatgagaaagttagtaagttttttaagggtggtatagaggagtggttaggattagatatttgtagttagttttgtttttttttaatttttcgttttggcgaagttattagatttgtatgcgttttagttagttttaatataaaattttgataagttttaaaaacgtaataaggagtgggtagtggagaattagagaagttagacgattaggttaaatagtaggtgaaggtagggatggttagaggttttgagtgtagttgattgttttttagtttgaaattttaagattgtttttttttgtagtattttttatattattgtttatcgttaaaatagtcgtttttttttttatttttgggt

SEQ ID NO: 540 - DNA, 2372 bp, Artificial Sequence
  chemically treated genomic DNA (Homo sapiens)
gtttagaagtagaagggaaagcggttgttttggcggtaaatagtaatgtggggagtgttgtagagaaaggtagttttggggttttaagttggagagtagttagttatatttaggatttttggttatttttgtttttatttgttgtttggtttgatcgtttaatttttttgattttttattatttattttttattacgtttttgagatttgttaaagttttatattagggttaattgggacgtatataaatttggtaatttcgttagggcgggaagttaggaaggagtagagttggttgtaggtgtttggttttgattatttttttatgttatttttgaggagtttgttgatttttttatgacgtttttttattttaggagttgtaagtgcgttattttggttggagtacggtgttaattacggtagattaaggttagcggtgatggtttgaatgttaggttgggggttgggattttttttgaggattttataggatagaggttggtttggaaagattaaggtgggattgaggaatattttttttatttttaatttcggtgggttgttgtaagtttggaggttagagaagacgggtttgggatgtcgcgggcgtaggggtaggtagtgaaggagatggttgttttcggtagagttggtcgttgaggtagaagaggagggcgtggggcgtggggcgtgaggtggtcggcgtttcggttggttaatggtcgggttgcggttttttcgcggggcggggtgggtttggtgggcgggcggggttcggggcgggggcggagagggagtttggtgggcgggcggggcgcgttttgcgggttttttcgggtatcggcgttgtcgtatttcgtcgcgttttcgtattcgcggttcgtttatcgcgtcgttttcgtatttgtattcgtagttcggcggtttttcggcgggagcgagtagatttagttcggttcgtagcgtaattcggtttagtcggggtgggtgaggggcggcggcgggggaggggacgattttgttgagtttagttttttttggtggatgtggggcggggcgttcgagtaggattcgacgttaaggggagggggttgatttgtgtttggtttattttaggtaggggttgagagaggtttgaggtggaagtgggggtcgggtattttgatttggtcgaggaggggttagggtttgaatcggggatagagtttaggtgagttggggtttgggagttattagcgtagaggattcgggttcggttgttttggcgagggttttagtattataggtgaggagtagagtttagtttgtgttcgaggatgggggtgcggggttttggggcgatcggggttcgggttggagcgggtggggtcgcgttttttcgggtgtaggggagttgcgtttttaggggtttcggttttttttcgttttcgggcgggtgcgggaaagaggggcgttaggggcgggcggcggggcggaacggggcggggcggcgggtttagcgaggggggtggttcgcgcgtttttgatcgcgtttcgggatatataggcggcggttgcgggcgtagagcggagatgtagcggtttggggttattttgttgtgtttgttgttggcggcggcggtttttacggttttcgcgttcgtttcgacggcgatttcggttttagttaagttcggttcggtttttagttattcgtaggaggaggttatttttaatgagatgtttcgcgaggttgaggaattgatggaggatacgtagtataaattgcgtagcgcggtggaagaggtgggtgcgttttggcggcgcggggttttgagaagcgttagattgggggtagcgaagtttgggaaggtatggaagagcgttggttagggatttcgggtttcgcgtagggtttgggaagggtcgatagtagatgcggagtgatttggaggtagcgtacggtgatttttattttcgtttcgttttgtttttttgttaaaaagtttggatttgagtttgtttatcgagaggttttgtattggattttttttaggtagttggggttattatttgtttgtagttggcgttaggtatgtcgttggttttttttattgttagtagaggtttgtagggtttttggtattttagtattgtggttttatagaaattcgggataagttttaggtatcgttaagttttagtttgttcgttatgttttgagtttgttaggatgttatgtagggataaagaggtaaagagttttgagttttgttggtagtttgtttgggttgttttgttttttacgtaatgtgggggtagagagggaagatggaaattttaaattttagtattgtatgagtggcggatgaggatgtgagaggtaatat

SEQ ID NO: 541 - DNA, 2347 bp, Artificial Sequence
  chemically treated genomic DNA (Homo sapiens)
tatatatttaatatttgataatatttatgaaagatgagttaatatattgaacgttagaaatgtatattattaatttttatttttatttttttaatgggttatttttttttattgatatttattttatggttttagttttaatcggttaataggatgttaaagtagtttaagatttttttattattgtatagtgatttagttttgaaaggttaaatttatattttgatatttgatttcgataattaattatttttgaggtaggtataagaatattaatttaaaagtatatgggtaagtaatttaatattggtatttatgaattacggttatgtaatattatttttaaagtgtttttttttatattgatatatttagtttttaagatgtaaatgttagaaaataaaaatagaatataaatattaatttttaaagataatttaaaaatatagaatatattaaaatttaaaagaagttttgtgttatttttgagtatagtagagattatgtgggatttagtattataaataaaagatgaattatatatttagattaattaaaattaaatatttttggttgattaaaaaaatttttaattttaattatttaatttttaataaacgttataattaaatgattaagaaataagttattcgtttgattattttttttattttaaaatgattttattttaattaatttgtttaataggtttagaatttttttttttatcggaacggacgggaaattgaattattttagtaaatgaagaaaaagttgttttttttgaatgagattagcgtagtagattaagttgtgtttaattttgtagagaatatttttgagagcgcgttttttgatttcggttagttgatgatttgttaacgaacggtataaaattattttatttttcgattgtaaagagattacgttatttatgttgtgggtaggagcggcgtgaagacggaataaattagttttttttagaagtaggttattggtgttttcgggacgcgaatcgcgaagtttatataaagttcgagatgggttttcgggggttattttgataaagcgggggtgaaagagggagcggtcgcggagcggtcggtcgcggaaacgtgatacgattatttttagtaagtggttagagcgcggggggtgttttgggcgaggggtaagttgatagttatcgagttttttgatgagttttgttaggattatttcgtttcgttaatttgtagtcgtcggagaattaaattgtcgcgttattgcgtttagttataattaatgtattttcggaaatacgttttgtgggacggtgagtttcgtaacgtttgcgtttattaggagtaggagttattacgtgagtttttcgcggttttagcgtcgttaggagagtttttagtttttttagaattattattgcgtattttttggatagtagttttcgtcgtaagaagcggagggaaaaaaaaaagtaataagtagggatagaattagcgttggtcgtcgcgtacgtcgggagttgtagttttggttaggtcgtgcgttttgtatcgattttcgggttcgtcgcggcgttcgttggtttggggtttcggtttatagcgcgggaattcgggaatttagcgcgggttgtagaggttttagtaggagtttcgtttttcggttcgtcgacggattcgtttttggttttgttaatttgatttttagtttttagaattttacgatttagaatgtagatttttgttttgtgatagttttttttattttcgattattaaatgacgaattttttttaattgtgaaatgtatttgtaaagttaagtagtgtttttggatatttaagtttagatatgaataagtaagttataaaagcggggtgggcgggtatgagtgagtagaagagagaaatcgggttgtaaaaaaggaaaataaaggcgggacgtgggggtatgatttgttgaatggtattaaagttgattttttgtatcgtgtatagtgatcgagttgagtaaattattttttttttaattataagtagcggtaagaataataataaaattatatttggaaaatgatttgtattttttcggtttgattattttacgttttttgggaaagggatgttaaggtaggtaaagtgggttttcggtatttttaggtaattggttttaggattttcgtagatatttaaatttatttatgtttaagttttttttataaaatggtgtagtatttgtatataatttatatatatttttttatatgttttaaattatttttagattgtttataatatttaatatattgtaaatgttatgtaaatagttgttatattgtatttttat

SEQ ID NO: 542 - DNA, 2347 bp, Artificial Sequence
  chemically treated genomic DNA (Homo sapiens)
ataaaagtatagtgtaataattatttatatagtatttatagtgtattaggtattgtaagtaatttagagatgatttaaagtatataggaggatgtgtgtaggttatatgtaaatattatattattttataaaagagatttaagtatgggtggatttgggtatttgcgggggttttggaattaattatttagggatatcgagggtttattttatttgttttgatattttttttttagggaacgtgaaatgattagatcgagaaaatgtaaattattttttaaatgtaattttgttgttgtttttatcgttgtttataattaaaaaaaaaataatttgtttagttcgattattgtgtacggtgtaaaaaattaattttggtattatttagtaaattatatttttacgtttcgtttttattttttttttttgtagttcggttttttttttttgtttatttatattcgtttatttcgtttttgtagtttgtttgtttatatttgaatttgggtatttaaagatattgtttgattttgtaggtatattttatagttaaagagggttcgttatttagtagtcggggatggggagaattgttataaagtaaaagtttatattttaaatcgtgaagttttgggagttgagaattagattggtagggttaagaacgaattcgtcgacgagtcgggaggcggggtttttgttggggtttttgtagttcgcgttgggttttcgaattttcgcgttgtaagtcggaattttaggttagcgggcgtcgcggcgggttcggagatcggtgtaggacgtacggtttagttagaattataattttcgacgtgcgcggcggttaacgttggttttatttttgtttgttgttttttttttttttttcgttttttgcgacggagattgttgtttaggaagtgcgtagtagtgattttagagaggttggaagtttttttggcgacgttggggtcgcgaagggtttacgtaatgatttttatttttggtgagcgtaggcgttgcggaatttatcgttttataggacgtgttttcgggggtatattaattgtggttggacgtagtggcgcggtagtttaatttttcggcggttgtagattgacgggacgagatggttttggtagggtttattaggaaattcggtaattgttagtttgtttttcgtttaaggtatttttcgcgttttggttatttgttgagaatggtcgtgttacgttttcgcggtcggtcgtttcgcgatcgtttttttttttattttcgttttgttaggatagttttcggggatttatttcggattttgtgtaaatttcgcggttcgcgtttcgaaggtattagtggtttgtttttgaaaaaaattggtttatttcgtttttacgtcgtttttgtttatagtataaataacgtagtttttttgtagtcgggaaataaaatagttttgtgtcgttcgttgataggttattagttggtcgagattagggagcgcgtttttaagagtattttttgtaagattgagtataatttaatttgttacgttgattttatttaggagaggtaattttttttttatttgttggaatggtttaatttttcgttcgtttcgatgaaggaagaggttttgaatttgttaagtagattggttaaggtagggttattttgaaataaagaaaataattagacgagtgatttgttttttagttatttaattgtagcgtttattgaaagttaaataattggggttaaaagtttttttaattaattagagatgtttaattttaattaatttgggtatatggtttattttttatttgtgatattgaattttatatggtttttgttgtgtttagaagtaatatagaattttttttgagttttggtatgttttgtgtttttgagttatttttggaggttaatatttgtattttgtttttgttttttgatatttatattttaaaaattagatatgttagtatgaaagggagtattttaaaaataatgttatataatcgtgatttataaatattaatgttaagttgtttgtttatatgtttttagattggtatttttatgtttattttaagagtagttagttatcggggttagatattaaagtgtaagtttaattttttaaaattaaattattgtataatggtagaggaattttaaattattttgatattttgttgatcggttggggttgggattataaggtgagtgttagtggaaaaaagtaatttattaaaaaaataagagtagggattgataatgtgtatttttagcgtttagtgtgttggtttattttttataaatgttattaagtgttggatgtatg

SEQ ID NO: 543 - DNA, 2224 bp, Artificial Sequence
  chemically treated genomic DNA (Homo sapiens)
tttgaaaaagagtttaaaagtatattaaatatttagtatattaattattattggttattgaataattaataaaattttattttttaaatagtaagaaggtttagaaggttattagtttttattattagtttttgttaattttttagttagttttaaggatttaaaagataaagtttggagttgtttttattaattttaattgatgttatttggtgttatagagaattataagttttttaggaataaggtttaattggtagtaaggaattattaatgattaatttataaaatttatttaagtatttggtggtagttttaggataatggtagtaagtgatatgtagttaggtgataggatttttgtatttttaaggtttagaagatggtaaaggaagtggagtaagaagggtttggaatgacgttttattgcgtgtttttaggacggtttgttatgttatataatttgaggagttaaattaggaggggaggtaatttggatttaaagggtttatttagggtaagtagaaggaagtagttattaagattttatttatatgttattttattgtttttttttattatttttttttttaatttttttttttaggtttttaaatgattatattttcgtttttagtagtaaaacgttcgtggaagtagaagatggatgttgtggtaattgaatttggagttagatttagaattttagtttttttattcgggaggaggttttgtatggttgtttatgggttttttaagaaggtagtgttttgaggcgggtttttgattttttttttatttttgttgttaggttaaggatcgcgttattttaatttatttgatttttggattacggtttgagaagtttggttttgtggattttttagtgttattttttttatagtgattttttaaggttatagttttttaatttttgattttgtagttttgatgtgaaagaataaaagtgtttcgattttaaatatattggagatagattcgacgtcgggcgggttatgggtatttagcggaaaattagatagataaaaagattttgttttttcgaagtttatattgtggtgaatttaaaagttgttttttaatattagcgttttatttattagtagttttgtttagggcgaggcgtttcgatgtttgaagtttattgtttaggcgaaggagaatatagtgtttttaaggattattgtaagttgggcggttaaaatttgaaagaatataaatcgtagggtaacgaaggaggcgggggtttttggaggttatttttattagcgttaatacgggcgaaattaggggatttagtaggagtttgaaaattttaagttaaataaatagtgagattatattttttattcgttatttttttttattgtcgtcgtcgcgagacggttgtttcgggggtggttcggggaaggtaggggggttcggagaagacggattttgttttcgtttttttttttttttttatttttaatatgggttttgttttggagcgtttcgtagaagtcgtggattcggttttggagtgtaaattgtgcggttaggtgtttgaagagtttttgtgtacgtcgtgcgggtacgttttttgcgttagttgtttgttgttttgggcggtgcggaggcgtcggtgttcgttgtagtgttagtttttggcgttcggcgagttgtatcgggtgttgtcgttgcgtagttttatttagaagttgcgagtttagtgcgattatcgcgttcgcggttgcggttattcggttaggttgtacgagttggaggcgtacgtcgagtattgcgatttcggttttgttcgtcggtttcgtagtcgcgggggttgcgtttcggggttgggcggtggtgaggtgttcgcgcgggggggttgcggttcgatatttagggttggtcggggcgggggcgcgcgcggggggtcgtcgggcggtcgttggggtcgcgggcggggattcgggtttcgggttttcgtttggaggcggcgcgagaaggcgttgttggcgtagttttgggcgttgtagggcgaggtgtagtttacggcgcgtaggtattaggagaagtttatttaatatatggtttacgttcgtaatttcgtcggcgatttcggtggcggttatcgtagggtaagtaaaggggggtgggtatcgcgggtatggtcgattggggtgggaaaaggagcggttttttttgacgttttaggattttt

SEQ ID NO: 544 - DNA, 2224 bp, Artificial Sequence
  chemically treated genomic DNA (Homo sapiens)
aggaattttgaagcgttagaaagaatcgtttttttttttattttaatcgattatgttcgcggtgtttatttttttttgtttattttgcggtggtcgttatcgaggtcgtcgacgaagttgcggacgtgagttatgtattgggtgaattttttttggtatttgcgcgtcgtgagttgtatttcgttttgtagcgtttagagttgcgttagtagcgttttttcgcgtcgtttttaggcgaggattcgaggttcgggttttcgttcgcggttttagcggtcgttcggcggtttttcgcgcgcgttttcgtttcggttagttttgggtgtcggatcgtagttttttcgcgcgggtattttattatcgtttagtttcgaagcgtagttttcgcggttgcggagtcggcgggtagggtcgaagtcgtagtgttcgacgtgcgtttttagttcgtgtagtttgatcgagtggtcgtagtcgcgggcgcggtagtcgtattggattcgtagtttttggatgaggttgcgtagcggtagtattcggtatagttcgtcgggcgttaagggttggtattgtagcgggtatcggcgttttcgtatcgtttagggtaataggtagttggcgtagaagacgtgttcgtacggcgtgtataggggttttttaagtatttggtcgtatagtttgtattttagagtcgggtttacggtttttgcgaagcgttttagggtaaagtttatgttagggatggggaagaaagggggagcgaaagtagagttcgtttttttcgagtttttttgtttttttcgggttattttcggggtagtcgtttcgcggcggcggtagtggagggaggtggcgggtgggaggtgtgattttattgtttgtttggtttgaagtttttaggtttttgttaggttttttgatttcgttcgtattgacgttaatagaagtaatttttagagattttcgtttttttcgttgttttgcgatttatgtttttttaaattttggtcgtttagtttataatggtttttgggaatattgtgttttttttcgtttgaatagtgaattttaagtatcgaggcgtttcgttttgggtagggttgttgatgggtaaagcgttaatgttgagaaataatttttaaatttattataatgtaagtttcgggagagtagaatttttttgtttgtttggtttttcgttgaatgtttatggttcgttcggcgtcgagtttatttttaatatgtttgaaatcgaagtatttttgtttttttatattaaaattataaaattagaagttaggaaattgtgattttaggaaattattataaggaaaataatattaggaaatttatagggttaggttttttaaatcgtgatttagaaattaggtgagttagaatggcgcgatttttgatttagtagtaaagatggggaaaaagttaagggttcgttttaggatattgtttttttagggagtttatgaatagttatgtaaggttttttttcgagtgaggaagttgggattttgagtttgattttaggtttagttgttatagtatttattttttatttttacgggcgttttattattggggacgggaatgtgattatttgggaatttggaagggaaaattaaagggaaggatgatgaaagaaagtagtgaaataatatataaataaaattttagtggttgtttttttttatttattttgaatgaattttttggatttaaattgtttttttttttagtttgattttttaaattgtgtagtatgataagtcgttttgaaaatacgtagtagggcgttattttaaattttttttattttattttttttattattttttgaattttaggaatgtagagattttgttatttggttgtatattatttattgttattattttgaagttgttattagatgtttgggtgggttttataaattaattattgatgattttttgttgttagttgagttttgtttttggaaagtttgtaattttttatgatattaaatggtattagttggaattgatgagaatagttttagattttgttttttaaatttttggagttaattgaagaattagtaaagattaataatagaggttaataattttttgagtttttttgttgtttgaaagatgagattttgttagttgtttaataattagtgatgattggtgtgttagatgtttgatatgtttttaaatttttttttaaa

SEQ ID NO: 545 - DNA, 2284 bp, Artificial Sequence
  chemically treated genomic DNA (Homo sapiens)
tgtggtattgttttttgtatcgtagggtttttcgggatcgatagattttggataatagtagttgggaaatattttaaatatataatatatttttaatttttaaatattggagttgtggggtttttttttttttttttttttttttttgggggttggaggcggaattttttggaaaattttggtattttgtttttttattaattttattttttgtggttgtttttattaagatatattttttttttgataatttttttatattgtatttagtataatagatgtatttgtggatttattgggtttttattgggttttgggaatattgatgttattttatttaaaaattaatttaagtttaatgttttgatgaaaatgaaaatatatttatagggaagtaaatatttatagttatttagttttttaaatgttatatatattttattttatttaaagtgttttttttttttttttaattataaaataatttagtttatttttaggaagatttttttatttattgtttttagttatgttagtatattttcggttttaaggatagagaatagttaggagttatagtattttgttttttatttttcgtatgtttttttttaatttttattttttttttttttcgtgttgtttttttttttttttatgtaaagtagaataagaagattgttttttataaagataataggttttttttaattgtaaatgattatattataagtcgtatttgttagttaattagtgtatttaagtttttgttagcggatgttgaaatgatgtttgtaataattgattgggtttttgcgagtttagggatgtagatttttttttttttcgtttttcgtgcgagttttagtcgttaatgaaaatcgtatgaaatagattttttttttgttatgtaatcggtttttttttcgtttttcggttgatttgggtataatgttttttatgagagtggagatgtttgcggcgacggcggagttggggaaggggacgcggggattcgagagtacggaacgtttcgtttaggtggacgttagtttttcgtttgcgagtagtttagcgtatcgtttatttggttgcggacggggtggttttatttaattatgatttttttttttgaaacggagtaagattgaataatttattatacgacggatggcgagggaaggaaatgtaaaaaagaaaaggaaaagaaaaaaattggaattagatggttaaattttatattagtatcgagaggttgttaggagattttattttgttcgcggttgtttcggttttaggttcggtttttcggcgttcgcgggtttttattttttcgttcgtttagtttttttagttaggtgcggtcgttttcggattggttttttttggtcgagcgcggagagtagggttgggcgttggggttaagggaggggcggaggggcgcgcgtttgggtagggacgggggagggagattgggtggaatgaagtggggaaagataagagtggtagaagaaaaaaaaaattttcggttaggagaaaagtggtggattacgtagagagacgttatgaaattcgtagatttaatgaatgttatttaattttagtcgattggttgagtttcgttggtagcgtacgaagcgacgcggtttcgagataaaagcgagtgtagcgtcgcgtgttggggaaaaagtcgtatagcgtcggcgcggttcgggaggaaggggcgggggcgagtaggatagagttatagatttagagacgtttatttcgtcgtttatgttagttagcgtgttagcgcgtcgaggatcgggtttggtgggggcgggttgggtataaattaacgtgtatttttcgttattggaaacgtgggtgttttatgttgggggaattttttgggtttcggttttcgattttttagttttaattttttttttagtgttattaagtaagttattttcggagaaacgtttggaaagtaggaaagagtcgaagttcggggagtagttttgtttgttggttgtaggggttcggtttttagggttttgtgagataaggaaaaagaggttttgggtattgttttttatcgggttgaaattcgtgagaggtagtttcggcgcgggagtcggagtttgtatcgtttagagggggcgtagcgagcggtcgggacggaggggaggggttttatttttgagttttgtttgtatttggtggcgttttagtttgttgttttatttagttttttttgttttgtttattgtaattgggatttggtttcggttgttgt

SEQ ID NO: 546 - DNA, 2284 bp, Artificial Sequence
  chemically treated genomic DNA (Homo sapiens)
gtagtagtcgggattaggttttagttgtagtggataggatagaagggattgaatggggtagtaggttggggcgttattaggtgtaagtaaagtttagggatagggtttttttttttcgtttcggtcgttcgttgcgttttttttgggcggtgtaggtttcggttttcgcgtcggggttgttttttacggattttagttcggtgggaggtagtgtttagagtttttttttttttattttataaaattttaaaagtcgaatttttataattagtagataaaattgtttttcgagtttcggtttttttttgttttttaggcgttttttcgggaataatttatttagtggtattgggagaaaggttgggattggggggtcggggatcgaaatttaaaagatttttttagtatggagtatttacgtttttagtggcgggggatgtacgttggtttgtgtttagttcgtttttattaagttcggttttcgacgcgttgatacgttagttggtatgggcggcggggtgggcgtttttgggtttgtggttttgttttgttcgttttcgtttttttttttcggatcgcgtcggcgttgtgcggttttttttttagtacgcggcgttgtattcgtttttatttcggagtcgcgtcgtttcgtgcgttgttagcggggtttagttagtcggttggaattgagtagtatttattgaatttgcggattttatgacgtttttttgcgtggtttattattttttttttaatcggggatttttttttttttttgttatttttatttttttttattttattttatttagtttttttttttcgtttttgtttaaacgcgcgttttttcgttttttttttggttttagcgtttagttttgtttttcgcgttcggttagagggagttagttcggagacggtcgtatttggttggagaggttgggcgggcggaggggtggagattcgcggacgtcgggaagtcggatttggagtcggagtagtcgcgagtagaatggagttttttaatagtttttcggtgttgatgtgaaatttgattatttgattttagtttttttttttttttttttttttttgtatttttttttttcgttattcgtcgtgtagtgaattgtttagttttgtttcgttttaagagaggagattatgattgagtgaagttatttcgttcgtagttaggtaagcggtgcgttgagttgttcgtaggcgaggagttggcgtttatttgggcgaggcgtttcgtgttttcgggttttcgcgtttttttttttagtttcgtcgtcgtcgtaggtatttttatttttatgagaaatattgtgtttaagttagtcgaaaggcgagggagaagtcggttatataatagaaggggaatttgttttatacggtttttattagcgattgaaattcgtacggggggcgggggaaggaggggtttgtatttttgggttcgtagaaatttagttagttattgtagatattattttaatattcgttggtaaagatttaaatgtattgattaattgataggtgcggtttgtgatgtagttatttatagttgggaaaagtttattgtttttgtggaaggtagtttttttgttttgttttgtatggagaggagaggagataatacgaaagggaggaaaagtgagggttggggagaaatatgcggagaatgggaaatagaatattgtaatttttaattgttttttatttttaaaatcgaagatgtgttagtatgattaaaaatagtgaataggaagatttttttaggagtaaattgaattattttgtaattggaagggaagaaaaaatattttagataaaatgagatgtgtgtggtatttagaggattgggtggttgtggatatttgtttttttgtggatatatttttatttttattaaaatattaagtttggattagtttttaagtgaaataatattagtatttttaaaatttaataaaagtttagtggatttataggtatatttgttgtattaggtgtaatatggagagattgttagggggaaaatatattttaatagaaatagttatagagggtgaggttagtggagaaataaaatattagaattttttaaagaatttcgtttttaatttttaaaaaaaggaagagaaaaaaaaaaaaattttataattttagtgtttgggagttggagatgtattatatgtttagagtgttttttaattgttgttatttaaagtttgtcggtttcggggagttttacggtatagggagtaatgttata

SEQ ID NO: 547 - DNA, 2498 bp, Artificial Sequence
  chemically treated genomic DNA (Homo sapiens)
taagggttaagtaatgatgtataaacggggtttattgtttaaatttatagaaagtaaaacgtggaaaattagtaattttaattgatagtgtatatttaaagaatttatatcggtcgggcgcggtggtttacgtttgtaattttagtattttgggaggtcgaggcgggaggattatttgaggttaagagatcgagattagtttgattaatatggtgaaatttcgtttttattgaaaatataaaaaaattagttaggcgtggtggtatatgtttgtagttttagttattcgggagggtgaggtaggagaattgtttgaatttaggagatagaggttgtagtgagtcgagatcgcgttattgtattcgtttgggagatagagcgagatttcgttttaaaataaaaaataaataaaaagaatttatttaatagaattaagtattaatataataaatacgaagaattttagatttttggtttttaaaaaatatataaagatgatatttttttaaaatatttttataaaatatattgagattgtgatgttttatattgattgtatgaaaataatgaaaaagaattagtattgttttattataaaagttttattaatgtaaatttataaatttttttttaaatattttgagttaattttaattttatgatagaaatttattatttttagtaaaaatagttggtatttgggaaattaaaggtttaaaaattaagaatagtaattaaagaaatttgataaaatagtttttttaaaatttttatttatattataaggggaaattttgattacgtttttttttttttattaatcgtagaatttaatattaaggattatataattttatattttttttcgagaaaaagtaaaggttttgtgttgtagtaataacgtaagatatggagggaagttttatttaagatttttttgtttgttttttttttaaagttattttagaatattagggagggttgagaggtaaggtatgaagggcgtaatatttaatatgagtaacgcgtgtgatgtatttggttaaaatgtatatagaggatttgtttttgtttttagatagaagtttttcgttttgtagttatgagggttaattgttgaggttttatagttttttttttttttatattcggatcgttacgttttttatttattatttcgatgtagaggtagatttaggatttttgtatttgttaaggatttttcggtaagtttacggggcgggagtggttataagacggagttcgtttggttttggttttttcggtttatataagtttgttttttttttaatttttaatttttatagttttttatttttttattttcgatttattttgcgttatcgacgtttttggttttcgtttgtagtaagtttatttttattattatttttcgtataaaagtttgtatttattaggttaaagaggggaattaacgtttgtaggaatcgttttatcgaatcgtttggtcgcgttttttgttagattttatttgtcgttgcggatcgtatataattattttcggtatgtttcgcgtacgtattattttttttatttcgtttttttttcgtttaaatacgtgattttttttcgttttcgtttacgtttattttcgtttttttatttttttttaggaaggaggagggagttgggggtgttaaaagcgtagcgatttttttttttttttcgttttcgtttttgtatttttcgttataatgtttttcgggtcgttagcgtttcgacgttttttgggaaaatagtttatttttttttttttttttttttttgtttttaattaattagttattcgttagagagggatatgcgtagtgagtgtttttcgttttttttattcgaatttttttttttttttaagtagagagattttagtagtagtagtagttgatgatgaagagagaggtagtggtagagggggggtattttttatttttatttttaaagggataggatattaattttattttattttaattttgaatttaggggggtggggggaaggcggttgagtttttttttttattttttagttttgagttttgagagggggattgagtttgagagaggagaaggagttttttttttttcgaaaatttttatttacgatttttatttttttatttttttaattcgtttttttttttttattttttttttttttggtcgtgagaggaggagagaaagaaattaaaagttttttagtaatatagattttttgttgttgttgttgttgttgttgttgttgttgttgttgttgttgttattgttgttgttgttattgttgttgtttggttttggttggagatattttattatatttaggagtagttatttttttagtttttttttttttttttcgttttttttttttttattttttttttttattattttttgtgttattttttatagttttagggaaggtatttaaaagtggggggtaggaaaggtaagtgtgt

SEQ ID NO: 548 - DNA, 2498 bp, Artificial Sequence
  chemically treated genomic DNA (Homo sapiens)
atatatttattttttttgttttttatttttgagtgttttttttggagttgtggaggatgatataaagggtaataaagggggggagtggaggaggaggaggcgaaggaggaggaggagagttggggaagtggttgtttttgggtgtagtgagatgtttttagttagggttaagtagtagtagtagtagtagtagtagtagtagtagtagtagtaatagtagtagtagtagtaatagtagtagtaaagggtttgtgttgttaagaggtttttggttttttttttttttttttttacggttaaagaggaggagggtggagggagggaggcgagttggaggggtgagggggtaggagtcgtggatgggggttttcgaagaagaagaaattttttttttttttttaggtttaattttttttttagggtttagggttggagggtgggggaaggaatttagtcgttttttttttatttttttgaatttaaggttgaagtggggtagaattagtgttttgtttttttaaaaatagaaataaaaggtgttttttttttgttattgtttttttttttattattagttgttgttgttgttggggtttttttgtttgggggggagggggggttcgggtagaagagacgggaggtatttattgcgtatgtttttttttgacgggtggttggttggttgaaggtaggaggagggggaggggaggaaatgagttatttttttagaaggcgtcgaggcgttagcgattcggaagatattgtagcgggaggtataggagcgggggcggggaggaggaggaagtcgttacgtttttaatatttttagttttttttttttttttaagggaaagtggaggaacggaagtgggcgtggacggagacgaaaggaggttacgtgtttgggcgggagaggggcggggtgggagaggtagtgcgtgcgcggggtatgtcgggagtggttgtgtacggttcgtagcggtaggtgaagtttagtagaggacgcggttaggcgattcggtgaagcgatttttgtaggcgttggtttttttttttgatttggtaaatgtaggtttttatgcgagaggtaatggtgggggtaaatttgttgtaaacgaaggttaggggcgtcggtggcgtaaggtgaatcgaaagtgggaggatggaaggttgtggagattgggaattgggaagggggtaggtttgtataggtcgggaaggttaggattaggcgagtttcgttttgtggttattttcgtttcgtgagtttgtcgaggaatttttgataagtgtagggattttgagtttatttttgtatcggggtagtaggtgaggagcgtgacggttcgagtgtaagagagaagggaattgtgaagttttagtaattgatttttatgattgtaggacggaggatttttatttagggatagagataagttttttgtatgtattttgattagatgtattatacgcgttgtttatattggatattgcgttttttatgttttattttttaattttttttggtattttggagtggttttggggaaggagtaggtagggaagttttgagtggagtttttttttatgttttgcgttgttgttataatataaagtttttgttttttttcggagagggatgtgggattgtgtagtttttaatgttgagttttacgattgatgaaggagaagggacgtgattaaagtttttttttatagtgtagatgagagttttaaaaggattgttttgttaagtttttttggttattatttttagtttttgagtttttggttttttaaatgttagttgtttttgttgaaaataatgaatttttattataaaattagaattaatttaaaatatttaagaaaggatttataaatttatattagtaaagtttttatagtgaaatagtgttggtttttttttattgtttttatataattaatataaagtattatagttttaatatgttttgtaaagatattttgaaggaatattatttttgtatgttttttaaaaattaagaatttaaaatttttcgtatttattatgttggtatttaattttgttgggtgggttttttttgtttgttttttgttttgagacggagtttcgttttgttttttagacgagtgtagtggcgcgatttcggtttattgtaatttttgttttttgggtttaagtagtttttttgttttattttttcgagtagttgaaattataggtatgtgttattacgtttggttaatttttttgtgtttttagtagggacggggttttattatgttggttaggttggtttcgattttttgattttaaatgattttttcgtttcggttttttaaagtgttgggattataggcgtgagttatcgcgttcggtcggtgtaggttttttaggtgtatattattagttaaagttattaattttttacgttttgttttttgtaagtttgggtagtggatttcgtttatgtattattgtttagttttta

SEQ ID NO: 549 - DNA, 2357 bp, Artificial Sequence
  chemically treated genomic DNA (Homo sapiens)
ttttacgtttttgttgcggtcgacgttttagtttttgtttttgtttttatagggtttgttttgtgtatttgtttttattttgttttgttttttatggaggaatattagtgattgatttgggatttagttttaatttagggtgatttcgtttttagatttttaattatatttgtaaagttttattattagggaaggttgtattttgaggttttgggcggatatgaattttgggggtaggatattgtttagtttagtgtcgggcgtcgttgtgggttaggttttttgatttttgtaagtttacgatggttatagagttttaaggaggaggttttttggaggaggcggtttagtttattagagaattagtatgttttttttttgggttttgggattagtatttttaacgataagtttttttggattacgttgattcgggttgagatttgtcgtttgtcgcgcgttttgggcggaggttagataggtcgcgtatttttaagttttgatacgttttttttttaaagggtggaggttttatagggtgagtgtaggttggggatgggtcgtggggttgtcgggaggggattagtgggggtttgtagtgttttcgggagggttcggggttgggggtaatcgagatttgtttcggtgggtgagtggagaagtatttggggggttttttttagcgttggagagaaatgggtgatgaagtttgggaaaggcgtggggggttcgaagcgtgtattacggtgagaaggttgcgcgtggtcggattttagttttttcgcgtttgcgaaaggttgagttgcgtcggtcgggggagggtcggaggttgtcgggggttgggggatgaagagtcgggggtagtttagggtagcgtatttttcgcggaggtaggaacggtaggcggtgcgatttttattaggatttttgttatcggaatcgcgggtttttgtcgggtcggaggcgtttgagagattttcgcggaacggcgcgtgaatttgcggtcgcggcggcgggttcggatggagatggacgttggatgggttgttttttgagtttggttttcgtggcggggtcggtttttcgtttttgtatttggtagatttgatgcggagttcgagggtggttgttggtttggggcggggaaggggttttttagatcgggggttttatttgttgggtttggggagtttatttggttttttttgattggtttggagttgtaggtgaggttattttaggaagttgttgtatttgagggagttcgggtcgttttgggggacgttggggtttgatttttggggttgggggttgtacgggtgggtcggggtttgtttgggttggggttcgcggtcgcgtggggtttggattggcgtttgtttggtttgggggtttttagtcgtatgtagtttgggtcgaggtcgggggttcgcggtcgcgtggggtttgggtcggggtttgtttggtttgggggtttttagtcgtatgtagttcgggtcgaggtttgtagttgcgtggggttcggtttttatggtttttgtgtttggatttcgttttttaattattttttttgtacgtttttttggaaaaggatatggggtttagggtggtggatgtggatattttttgaaatttattagttttggtttgtgatgtttggatggaggggttatagttacgtcggtttttagtttttttttagatattttagtttttggaggtagggttttttcgtgaggcgtattatttttgagcgttttatacgtttgtttttgggtatttttttgggtggtggtgtggtgcggttttgcgtttttatttaaattttatatggaaatggagtttgtagtgtgacggtggggtttggtggggagtgattgggtagtaggggcggatttttcgtgaatggtttggtttcgttttttttggtgttgttttcgagattgtgagtggttatttaattgtgtttcgtatttgttttgtttttttcgttttcgtttacgttatgtgagatatttgttttcgtttcgttttttattacggttggaagttttttggggtttttttagaagtagaaatatttgtgttttttatatagtttataaagcgtgagttaattaaatttttttttttataaattatttagttttagggttttttttgtttgtttgtttgtttgttttggtggaggcgggggtggatagcgtttttttttgtcgtttaggagggagtgtagtggggcgattttagtttaatgtattttttgtttttgggttgaagtgatttttttgttttagttttttgagtagttgggattatagttatgtgttattatgtttggttaatttttatatttt

SEQ ID NO: 550 - DNA, 2357 bp, Artificial Sequence
  chemically treated genomic DNA (Homo sapiens)
aaagtataaaaattagttaggtatggtggtatataattgtaattttagttatttaggaggttgaggtaggagaattattttaatttaggagtagagggtgtattgagttgagatcgttttattgtatttttttttgggcgatagagagagacgttgtttattttcgtttttattaaaataaataaataaataaataaaaaaaattttgagattgggtaatttatagagaaaagagtttgattggtttacgttttgtaggttatatggaaagtataggtgtttttgtttttggagaggttttaggaagtttttaatcgtggtggaaggcgaagcgggagtaggtgttttatatggcgtgagcgggaacgagaaagatagagtaggtgcgggatatagttaaatggttatttataatttcgaggatagtattaggagggacggggttaagttatttacgagaaattcgtttttgttatttagttattttttattaggttttatcgttatattgtagattttatttttatgtgaggtttgggtggggacgtagagtcgtattatattattatttaggaggatgtttaggagtaggcgtgtggggcgtttagggatgatacgttttacggggggattttgtttttaggggttagggtgtttgggaagaggttgggagtcggcgtggttgtggtttttttatttaggtattatagattagggttggtgggttttagggggtgtttatatttattattttgaattttatgtttttttttagggaaacgtgtagaggaaatggttggagagcgaagtttaggtataggggttatgagagtcggattttacgtagttgtagatttcgattcgaattgtatgcggttgaggatttttaagttaggtagatttcgatttagattttacgcggtcgcggattttcgatttcgatttaaattgtatgcggttgaggatttttaagttaggtagacgttaatttagattttacgcggtcgcggattttaatttagatagatttcgatttattcgtgtagtttttagttttagaagttaaattttagcgttttttagggcggttcgggtttttttagatatagtagttttttgaggtggttttatttgtaattttagattaattagagaaggttaaatgggttttttaagtttagtaggtgggattttcgatttagagagtttttttttcgttttaggttaatagttattttcgggtttcgtattaggtttgttaaatgtaggggcgaggggtcgatttcgttacgggaattaaatttaggaaatagtttatttagcgtttatttttattcggattcgtcgtcgcggtcgtaggtttacgcgtcgtttcgcggagattttttaggcgttttcggttcggtagaaattcgcggtttcgatggtagaggttttggtgggaatcgtatcgtttgtcgtttttgttttcgcggaggatgcgttgttttaaattgttttcggttttttattttttaattttcggtagttttcgattttttttcggtcggcgtagtttagtttttcgtagacgcgggggagttggaattcgattacgcgtagtttttttatcgtggtgtacgtttcgggttttttacgttttttttaggttttattatttatttttttttagcgttgaaggaaattttttagatgtttttttatttatttatcgaagtaggtttcggttgtttttagtttcgggttttttcgagaatattgtaagtttttattggttttttttcggtaattttacggtttatttttaatttgtatttattttgtggggtttttattttttggaggaaggacgtgttaaagtttggaggtgcgcggtttgtttaattttcgtttaaggcgcgcggtaggcgataggttttagttcggattagcgtggtttaaaaggatttatcgttaaaagtgttggttttagaatttaaggggaagatatgttggttttttgatgagttgggtcgttttttttaggaagttttttttttggagttttgtagttatcgtgggtttgtaagagttaaagggtttggtttatagcggcgttcggtattgagttggatagtgttttgtttttaaaatttatgttcgtttagaattttagaatgtaattttttttggtagtagggttttgtagatgtaattaaggatttggggacgaggttattttggattgaggttgagttttaagttagttattggtgtttttttatgaagagtagagtagaatagagatagatgtatagagtaggttttgtgaggatagaggtagggattggagcgtcggtcgtagtaggggcgtggag

SEQ ID NO: 551 - DNA, 2193 bp, Artificial Sequence
  chemically treated genomic DNA (Homo sapiens)
ttgtagtataaaggaatataaaagggtagagtaaagtttttttttttaaggtgaatatttttaaggtaagtatttatttgtaaaagttttttttttttattatgtttgaaaatttattattacgcggttagtattataagagatattttttggttaaaaaaaaaaatattattttgtaatttagtatatatttgtagttggtgtgtttatttaaattaattagtaggttaagagaatttaaaattttatatatatgagtttaggtattaatgtcgattatatagtatatagtatagagggaggtttttatatttatatatatatatattttatttagtatttatattaaaagttttattttttaaatatttttaattattttgtaaatagtaaatgtattattggttattatttttaatagttcgtttttttttttttttattttttttatttttattggtttttttgtgtgataatgatttatatatggatagggtttaaattatttggaagatgtttgattttaggttgaaaagtagtttttaataaaattggttttttgtagttattataaagtattaggaaaagggtattttcgcggttatttttagttaggttagtatagcgtttcgtgttcgttgaatcgttttaggtagttttttgatgatttaaattattattatttttgggtttagagtaggataaatgaaattttaataggggtttgttttgtgatcgaaaattatttagttttatagtttttgaatgtaaggagaggtggtttttttagaattaatatgttttttaaggtgggtacgtttacggttttgggaaatgtatattttaggtaatttataggtgcgattttttagtggaggcggggtagtttgaatttttggttttgtaggagtgggaagaaatcgtttttgttttttcgataattgagttttttatttggggttgggagggcggatagtaggatcggtttttttattttttatcgcggtttttcgatttggttagtagttttggcgtttagataaaaggttttttgagttgggggtggggggtaggtcgagagtaggtcggtaaattagatttcgtagttttttaagttattagttttgtatttgggtgtagagatttcgttttaaaaattcgaagtatcgttttggttcgttttttgttcgcgggcgcgggttttcgtttatttatttatttatttatttaattatttatttatttatttatttttttttgacgtattcgttcgtttttcggtcgtttcgggcgtattatcgtttttttttttgtttgagggattttttgcgttttaggattattttatagagtttgtttatgttttcggtgaggttttcgtcgatgatggcgtacgtcggttggacgtgataggtggtggtcgggataagttcgtgtagcgttagttgttttttaatttttgttatcggtagcgatttgggtaggttttgtttgttggcgatgattagtagcggcgtgttttggttttcggcgaatttggttattttgtgtagtttcgttttggttttttttagtcggtttacgtttatcgagtttattacgtagatgatgtcgttcgtgtagcggttgtaggatttttatagcggtcgtagttttttttggtcgtttacgttttagaagtggtagttgatgtttttggtcgtgtcgttgtttagtttgattttttcggtgttgaagtcgatggtgggtatcgtgtttacgaattcgttgaatttgagtcggtagagtatcgtggttttgtcggtcgagtttaagtttaatatgacgatatgtagggattggaaggtcgagatgttagaggagatgttgtttatggtttttggttgcggcgttagttattgcggttgcggcgggagggcgtcgtttttcgagtagttacgggttcgacgcggtcgggcgtatttgggtttcgttcgtcgtcgttcgtatcggtttcggggttcggcgttttcgcgggcgtacggtttggcgcgtttagacgtcgtagttttcgcgttttcgtcggtcgggttcgcgatcggcgggtatcgcgtttttacgcgcggttttgtttttcgcgaagtcgttttagatgttcggcgttttttttaggtttgggttcgttttgtggttttttcgggtcgcgttttcgcg

SEQ ID NO: 552 - DNA, 2193 bp, Artificial Sequence
  chemically treated genomic DNA (Homo sapiens)
cgcgggggcgcggttcgaggaaattatagagcgagtttaggtttggggagggcgtcgaatatttgaggcggtttcgcgggagataaagtcgcgcgtagagacgcgatgttcgtcgatcgcgagttcggtcggcgagggcgcggggattgcggcgtttgagcgcgttaagtcgtgcgttcgcggggacgtcgagtttcggggtcggtgcgggcggcggcgggcggggtttaggtgcgttcggtcgcgtcgggttcgtgattgttcggggggcggcgttttttcgtcgtagtcgtagtggttggcgtcgtagttaggagttatgggtaatattttttttaatatttcggttttttagtttttgtatatcgttatgttgggtttggattcggtcggtaagattacggtgttttatcggtttaagtttaacgagttcgtgaatacggtgtttattatcggttttaatatcgagaagattaagttgagtaacggtacggttaagggtattagttgttatttttgggacgtgggcggttaggagaagttgcggtcgttgtggaagttttatagtcgttgtacggacggtattatttacgtggtggattcggtggacgtggatcggttggaggaggttaagacggagttgtataaggtgattaagttcgtcgagaattagggtacgtcgttgttggttatcgttaataagtaggatttgtttaagtcgttgtcggtggtagagattgagaagtagttggcgttgtacgagtttatttcggttattatttattacgtttagtcggcgtgcgttattatcggcgagggttttatcgagggtatggataagttttatgagatgattttgaaacgtaggaagttttttaagtagaagaagaagcggtaatgcgttcggagcgatcggggagcgagcgagtgcgttaagaaagaatgaatggatggatggatggttggatggatggatggatggatgagcgagaattcgcgttcgcgaataaagagcgaattaaagcgatgtttcgaatttttaaaacggaatttttgtatttaaatgtaggattggtgatttaaggagttgcgaagtttgatttatcggtttattttcgatttgttttttatttttagtttaggggattttttgtttgaacgttagagttattgattaggtcggggggtcgcggtggggagtggaagagtcggttttgttgttcgtttttttagttttaggtggaaggtttagttgtcggaaagataaaagcgatttttttttatttttgtagggttagaagtttaggttgtttcgtttttattgggggatcgtatttgtgaattatttgaggtatgtattttttagaatcgtgggcgtatttattttggggggtatgttggttttggggggattatttttttttgtatttaggggttgtgaagttgagtaattttcggttatagggtaggtttttgttgaaattttatttgttttgttttgggtttaaaggtggtggtggtttgggttattagaggattgtttgggacggtttagcgggtacggagcgttgtgttggtttggttggggatggtcgcggaggtgttttttttttggtgttttgtggtggttgtagaagattagttttgttgagaattgttttttagtttggaattagatattttttagatggtttggattttgtttatgtgtaggttattattatataaagagattaataaaaataaaaaaaataaaaaaaaaaaaagacgaattattggaggtggtggttaatgatgtatttattgtttgtaggatagttaaaggtgtttaaagggtaaggtttttggtgtaaatgttggatggggtgtgtgtgtgtgtggatatagggatttttttttgtattgtgtattgtgtaatcggtattaatatttagatttatatgtatggaattttaaatttttttagtttattgattggtttggatgagtatattagttgtaggtgtgtgttgaattgtaagatggtatttttttttttaattaagggatgttttttgtaatattaatcgcgtgataatgggtttttagatatgatgaaaaaaaaaaatttttataaatgaatatttattttagaaatatttattttaggaaaaaagattttgttttgtttttttatatttttttatgttgtaa

SEQ ID NO: 553 - DNA, 2410 bp, Artificial Sequence
  chemically treated genomic DNA (Homo sapiens)
attttttaaagattatgtaaaaaaaaaaaaaaattaataaacgtttatttttggatgtttaattttggtttcgatagaatgttttttgtattaaaaaataagaatttagttaataatgtttttgttgttaaacggttgtatgaagattatgtttagttaaatttaattttttatttcgttttaaggttatgatttttaatttttattaaagtttttattattttttattttgtaaaggttttaaagaagttaatgaagaaggtaaagtttttgttttttgttgttatttagtaatgagtagttttatgtggtagtgtagaaattggggtttgagaaatagaggtgttttgatattttggatcggtaattacgaaaattttagtattgttataaagatgttgttttaattcggttttaaataaagttttgtcggcggtcggtagtgttttagtgggtagtaatgtggtgatatttttataggatattttataggttttaaaatatttttttttttttaggttattaattttttaaattatatagtggggtatggttggagtattttttttttgaggtaagggaattgaagtttaagaaggttttttgatttgttaagattttttcgttattttggttttaagaaattgggtttaagaaatttaagtttacggattttttgttttttgcgcgtttttattatatttttaatttaaagatttttttaaattttatagaaataatttagtaagggtagtttttgagtatatttttttttttgagttttaatttttatttaaggcgaaataattttttttttgaaagttttttacgttttttaagcggatagtattaagttcgtaggggatttgtattagttttagtaggtggattttataaggggcgggttgggggaacgttcgtttgatcgtgttcggcgtggcggggggttgggggcgagaagagtgggggttgttatgtagggcgttcggattaaataatacgtcgcgattttatattttagtttagtttagttatgtagttaaatgtttttttgttattatatatttacgattttggttgtgttgaggacgaaaatagagaaaagatattgattttagaatattgcgtttgggaggacgtagggcgtaggttttgtagtttttgagaatcgttttgcgtaaaagtgttttgaggtttcgtttttgcgtttttttcggtttaagtcgaatatagggttaattttattttataaagttaatcggatagaaattcgttatttcgcgaggagtttttttttattgtttttaaggggttttcgatattgttttgagcgattttaagatatttgggtgtttttgttgggtataaatttttttggcgttatttttattatttaatttttttcgcggtttttttttttttttttttaattattttttttatttcgcgtcgtttttatttcgttttcggtttcgttagttttatttagttaaattcgagcggtggaacgttgcgttgggtaaacgtcgcgcgtcgggttttttttcgcgcggtttcgggtagcgtttcgtggttatcgcgttttcggtaatagtagaaaggggagggaggagagttatcgaggaggggatagcgacgtttcgacgtcgttacgtttttcgttttttatacgggggttatcgtagttttttagaagttttttagggaagtaaagcgtcgttttcgtcgtaggtatcgagacgtcgtttagatggaagaaattttggagatgcgcgtttttatatcggtgtcgcggcgttcgggtttagtattacgtatttatgcgcgtttttgtcggtttttttagaaatttcgttttgtttattcgcggcgcgagacgtaacgacgtttttaggggttaaagatttggtagaaatgattttttaattttagatgtttttagtagtagtatttagtagttatataattgtttgaaatgaagaatgagtaatttggatgagtcggttttgaaatcgatttgtaatttattcggaacgtgagttgtttttttttgatttttgttggttgttttatttggagtttgagttcgatttatgtagtattttattgttcgcgttagtttagtttttattgttagtaattcgttattttgtttttttgtagcgaaggtttggaattttattacgggtgtgtagtggttagttttgagattatggtggtgttaggagaatttgttaattaatatagaaagttgttacgaatagaaatttaagttttggtcgggtgcggtggtttaagtttgtgattttagtatttattttgggaggttaagtcggatggattatttgaggttaggagttcgagattagtttggttaatatggtgaaagtttgtttttattaaaaatata

SEQ ID NO: 554 - DNA, 2410 bp, Artificial Sequence
  chemically treated genomic DNA (Homo sapiens)
tatatttttagtagagataggtttttattatgttggttaggttggtttcgaatttttaattttaagtgatttattcgatttggttttttaaagtaggtgttgggattataggtttgaattatcgtattcggttagagtttaggtttttattcgtgataattttttgtattggttggtaggtttttttagtattattatgattttaggattaattattgtatattcgtgatgggattttaaattttcgttgtaagaggataaggtgacgagttgttgatagtgaaggttaaattaacgcggatagtgaagtgttatatgagtcggatttagattttaggtgaagtagttagtagaggttagagagagatagtttacgtttcgggtaagttgtaggtcgattttagggtcgatttatttagattatttattttttattttaggtaattgtatgattgttaaatattgttgttgggggtatttggggttgggaagttatttttgttaggtttttgatttttgaaagcgtcgttgcgtttcgcgtcgcgggtaggtagggcgggatttttaggaggatcggtagaggcgcgtataggtgcgtggtgttgggttcgggcgtcgcggtatcggtgtaggagcgcgtatttttagagttttttttatttgggcgacgtttcggtgtttgcggcgggaacggcgttttgtttttttgaggagtttttagagagttacggtggttttcgtgtgggaggcggggggcgtggcggcgtcggggcgtcgttgtttttttttcggtagttttttttttttttttttttgttgttatcgggagcgcggtggttacggaacgttgttcggagtcgcgcgagggaggattcgacgcgcggcgtttatttagcgtagcgttttatcgttcgggtttggttgggtgaggttggcggggtcgggggcgagatgggagcggcgcggggtggagagggtggttggagaaagggaagggagggtcgcgggagaggttggatggtggaagtggcgttagagaggtttgtgtttagtagagatatttaggtattttagggtcgtttagagtagtgtcggggattttttggagatagtaggaaggggtttttcgcggggtggcggatttttattcggttgattttgtagagtgaggttgattttgtgttcggtttgggtcgggaagggcgtagaagcgggattttaggatatttttacgtagggcgatttttagagattataaagtttgcgttttgcgtttttttaggcgtagtgttttgggattagtgttttttttttgttttcgtttttaatatagttaaagtcgtggatatgtggtgatagaaaaatatttggttatataattgagttaggttggagtgtgaaatcgcggcgtgttatttggttcgggcgttttatatagtaatttttatttttttcgtttttaatttttcgttacgtcggatacggttaggcgggcgtttttttaattcgttttttgtgaagtttatttgttgagattgatatagattttttgcgaatttgatgttgttcgtttggaaaacgtggagaatttttagaggaggggttatttcgttttgagtgaaaattaagatttaaaggaaaaggtatatttaagagttgtttttattgggttatttttgtggaatttggaaggatttttgaattgaagatgtggtgggagcgcgtagagaatagagaattcgtaagtttgagttttttagatttagttttttaaagttaaagtagcggggagattttggtaagttaagaaatttttttgaattttagtttttttgttttagggggagaatattttagttatattttattgtgtggtttagaaggttaatggtttggagggagggaagtgttttgaagtttataaagtattttgtgaaggtattattatattgttgtttattgaaatattgtcggtcgtcgatagaattttgtttggagtcgagttaagatagtatttttatggtagtgttggggttttcgtgattatcggtttagagtgttaggatatttttgttttttaaattttagtttttgtattgttatatgaaattgtttattattgagtgatagtagaggataggaattttgttttttttattaatttttttagggtttttataaagtgggagatggtaggaattttgatgaaaattgagggttatagttttggagcggggtgaggggttagatttgattggatatagtttttatgtaatcgtttaataataaaaatattgttggttgagtttttgttttttgatataaggaatattttgtcggagttaaggttaaatatttaagagtaaacgtttgttggtttttttttttttttgtatgatttttagaggat

SEQ ID NO: 555 - DNA, 2668 bp, Artificial Sequence
  chemically treated genomic DNA (Homo sapiens)
agtatggtaaaagagaaatagttaaggagttggggatgtttagtttggaggagaaataatcgaataagttgtgattatgtgaaggttatgtttgtaaataagataagtattttatttattttttaaggtgttggggagtataagaataaaataaagtaggagataatattttttaatataagaattttttaatagaattgtttagtggtggagtggattgtttcgtaaaataagaatatttaagtattaattggataatttggttaagatatttattttgttaaacgattagtttattgtaaggttgttggatatatttatttagttttaaatgggaggaggggtggggtggtagataattgttaaggttttttttttagttcgagattatgaatttatttgaatttttaagattaattgttataatgtataatgtttttttatagtaatttatattaataataggttattttttttttttatttaggtaaatttaatttaggagttttttatttttttattaggttttttatagagtaaattttttttttagtagagtagtagggttttgggttttacggtttgtagtaatatttgattttataatttttagttgttttttttagaaagatgtatttttttagggttaggttagaaatgagtattttttttattttcgtggtagtattatttaggattggtaatttattttgtgatttaggatatgtttaagaattagaagaaagtaatttattaagtttcgggtttcgaattttagtgttaggggcgacgcggaatttttattttttatcgaaggggagaaaatgatgagattgttatagaggaattttttatattttatgagagataggttggggttattagcggttttgaatgtgagtttaaagtttcggtttggataagaaaaaataggtagttgaggaagacgggacgcgaagggaaatttttgttgtagatatcgcggattcgtacgttaagcggtaggttagattcgggcggtttgttttaggaaagggagagggaaggagagtggttaatgttttcgatgttgtattaattttaggtttttatacgttattttttcggatttcgtttttattttttaggtttcggaagaaaagcgaatgagtttttcgtacgttgaggttgtttagtagtattaaggtgcggggttcgttggcgtaaatcgcgttaagtaagggtagtagtaattaaaagagggtttaagttcgggtcgcggtgttgggttttatttttttttttttgtcgaaggatttagtacgtgtatatcggaagtattttatttacggtagtttaatcgcggttcgtgttcgtggagtattattcggaagtgatcgggatacgtcgcggttgggcgtttagagtcgtagttttggcgataaggcgcggagagcgtcgtcggaagtgttttggtgggaggtggattttttgaattttattggtgggagtgaattaaggtttcgtttttttaaagaaaaggtttaattttagagagatagttttgtagtcgcggttaattaacgaggtcgagcgttttttgtttcgtttaggtcggtttttcgttttttagtttggagtttatttttttttggagtttgcggggtttttttcgggtttgatcgtcgcgttttggatagggtgtttggttatttttttgttggcggggtttttattgggtttgggaaggttcgggattaggaattaggttttatttttattatttttagggaggaggagttggaagaataagattagggttagggtatttggagttttttttttgtcgtttacggttttaggggttatggtatggacgggtttgtgttgtttagttcggtggtttacgttggagattgtggatgggtagtagattggtttagcgatggttttatttttaagttgtattttttattagtcgttattcgggtattgtatttttttttaggatagtttttttggttgtaaataggattaaggacgaggtttagtttcgttgtttatttgtgtgttttaggaatagttatttaattattttatttttgggtttttgggaggaatatggtaggttttgaagtatttagcgtcgggttagagtgaatatttatttaataatgtggtttttattttttttaggttaatatagaggttattcggtttattttagatttgtttttgtttattaggggtttaagtaaaaattattataagtagtaagatttttatcgttttttgggttttaattataattttgaggttaatggtgacggtaattgtagagatagaaggtagtagtttttttcggatatttgtttattaatttaagaatggagtaaaaattaaaatttttttttatatatttttttaacggattttattttttttttatttttattggttttgttttaagttaagtttttgtagagtttttggtttttgtattttaatttttgtttttttattttcgatatatagtattatattcgttcgtttttaatttagagttaatagtgttaaattgttaagagtcggttacggtatagggatattttaaggttttttgtttttaggtttttatttatatttattttagtagtttcgtttttttttagtttttgtttagggtttt

SEQ ID NO: 556 - DNA, 2668 bp, Artificial Sequence
  chemically treated genomic DNA (Homo sapiens)
gaagttttgagtaaggattgagaggggacgaggttgttgagatgagtgtaggtggagatttgagagtaaagagttttggggtgtttttgtgtcgtggtcgatttttaatagtttaatattgttggttttgaattagaggcgggcggatgtggtattgtgtgtcgagggtggaagggtaggagttagggtgtaggagttaggagttttgtagaggtttaatttggggtagagttagtgggaatggagaggaagtagagttcgttaagaagatgtatggagggaggttttgatttttgttttatttttgggttggtggataagtgttcgaaaggaattgttattttttgtttttatagttgtcgttattattggttttaggattgtggttgggatttagaggacggtggaagttttgttgtttgtggtagtttttatttaaatttttggtggataaaggtaggtttgagatgaatcgggtggtttttgtattaatttagaagaggtgggagttatattattgaatggatgtttattttagttcggcgttaagtgttttaaaatttgttatgttttttttaagagtttagagatgaggtaattaaatggttgtttttaaggtatatagataaatagcggagttggatttcgtttttagttttatttatagttagggaaattgttttggagagaagtgtaatgttcgggtaacggttagtgagagatgtaatttggaaatggaattatcgttaggttagtttattgtttatttatagtttttagcgtgggttatcgagttgggtagtataggttcgtttatgttatggtttttggagtcgtgagcggtaggaaggaggttttaagtgttttgattttgattttatttttttaattttttttttttagaaatggtggaggtggggtttagtttttggtttcgagtttttttaggtttagtgaagatttcgttagtaagaaggtggttaaatattttgtttaggacgcgacggttaagttcggggaggatttcgtaagttttagagggaagtgggttttagattagggggcgggaggtcggtttgggcggagtaaagggcgttcggtttcgttgattggtcgcggttgtagagttgtttttttaggattgagttttttttttagggggacggggttttgatttatttttattaatagggtttaaggaatttattttttattagggtattttcggcggcgtttttcgcgttttatcgttaaagttgcggttttggacgtttagtcgcggcgtatttcgattattttcgggtagtgttttacgggtacgagtcgcgattgggttatcgtagatggggtattttcggtgtgtacgtgttgggtttttcggtaggaggaggaagatggagtttagtatcgcggttcgggtttgggtttttttttggttgttgttgtttttgtttggcgcggtttgcgttagcggatttcgtattttagtgttgttggataattttaacgtgcgggagatttattcgtttttttttcggagtttgaagggtgagagcggggttcgagggggtagcgtgtgggggtttggggttggtatagtatcgagggtattgattatttttttttttttttttttttttggagtaggtcgttcgggtttggtttgtcgtttggcgtgcgggttcgcgatgtttgtagtaggggttttttttcgcgtttcgttttttttaattatttgtttttttttgtttagatcggggttttgagtttatatttaagatcgttgatgattttagtttgttttttataaagtatggggaatttttttatgataattttattattttttttttttcggtagaaggtaagggtttcgcgtcgtttttagtattggaattcgagattcgggatttgatggattgtttttttttggtttttgggtatgttttgggttataggatgggttgttagttttggatggtgttattacggagataaggaaaatgtttatttttgatttgattttaggagggtatatttttttaaaagaaatagttaaggattgtggagttaagtgttgttgtagatcgtggaatttagggttttgttgttttgttgagaagggagtttattttgtaaagggtttgataaaaagatggaaagtttttgggttgggtttgtttgggtggaaagaggaaatggtttgttattaatatggattgttataaagaggtattgtgtattgtggtagttgattttaagaatttagatagatttatagtttcgggttgaaaaaagagttttagtaattatttattattttatttttttttttatttgaggttggataaatatgtttagtagttttgtagtgggttagtcgtttaatagaatgaatattttggttagattatttagttgatatttgagtatttttgttttacgaggtaatttattttattattgaataattttgttaagaagtttttatattaagaaatattgttttttgttttattttgtttttatgttttttagtattttagagaatagatagaatgtttattttgtttgtaggtatagtttttatataattatagtttattcggttgttttttttttagattgaatatttttagttttttagttattttttttttgttatatt

SEQ ID NO: 557 - DNA, 2182 bp, Artificial Sequence
  chemically treated genomic DNA (Homo sapiens)
taatacgattagtataagtagtttttgttttttcgttttgatttgagtattcgagggtttttcgaggtagtttgtacgggtatttcggggtttgcgtattgagtgaatttttagattcggtcgtgttttagtcgtttttgttttgaattttttattttttttcggtcgtttggacggttttttcggggcgtttgtgttttcgtggggtatttttaagatatttagtatgaaattttagtatcgattgtaaattttatcgaaagtagagttattcgtttttgttttcggtaaataatttaattttaagtttcgagtttttgtaaatttacgttggttgggttaatttcgttttttttttttttttttcgatttttgtaatagtttagagagtttggttttgacgtagtttaaaataacgtgcgttagtttcgttgttcggttgattatagtaacgagagttataagttttcgacgttgtttcgataatatgaagtaattatttataaaaatagtaatttacgtagtttggttatatatggagttggcgagggtggacggggatgtttttacggatttttttcggagaaaataaatcgtcgttgaaattttttttattttttttattattattttttattttttttttgtttttttttttttttagatgatttaattatagattttattgaaagggggtgggggtgggggtgggggggaatatatatatatatatataaattatatatatattatatatgtattataaaatatatatatatatatatatatatatatatatatatatatatatatgtatatatatacgtatatatattaaagaatattaggaatgtagttgcgggatgaacgcgtttgtttaagatcgagtgttaaaatggagttataagagtcgtttcgtgcgggtgtttatagaaggtgaaaatacgtaggtttgtaggttagcgtattgggaatcgagttaagcgcgtcgtagttcgggtttcgttttcgttttcgtcgtgtttcgtttttattttttttcgtttttcgttgggcggttattaaaagttgttgacgttaaaacggacggttatttttgatgagggtagagtttacgttgtattgaagacgaaatttcggggaggttaggcgttgtttttttttttttttttgttcggcggttttattatagttgtaatttgtagaggttcggagaatataattttttcgagaagtttaggtaagaatttttttttttaggtcgtggttttggttcgggatggttgtatatttagaagggatagtagttgggtagttcgagtgggtttgggtaaatataagtattggtgtatttagggtgcggtatttcgtgtgtgtacgtttggtgggggttttataaagtgttttcgaggtgagttgttggggaaaagggaaacgggagttttgtaaatggagcgacggggaggaagagcgagggtacgtatcgaataataatttatttttttgaaatagtagtgggatttttttttttttttattttgcgatgtagtttttagagatatttaggttgttgagttttttttttttgtcgttttaattttattattatgattgttgtcgttagggtgttattatttagggaagaattaagggggagatagggtgtgggtgttggggaggcgaaaggagaaagggggagttttcgtttcgggtaagttgagttgttgtagcgatagtagtttttatgtttcgcggatttgatttatgtcgtttgttttacgttaattgtaggttggcgggaggcgggcgggtcgtgtcgggtgggagggttttgcggagggttggcgcgggtgggttggtttcggggattgcggcggttcgcgtttagtattttggatagtaatatcgagggttcgcgcgggcgttttcgattttttagtatcggggatagcggttcggtcgtagcgttttatttgtttgcggtagaaatgtttggtcggggttggatgtgttagggttggagattaaattgtttttttgagatttcggttttacggagatttttaatagaggagttatagtagtttaaaagaaaataagaaagaaataaattttttttatagagatttttttgtagataattttttgtttttttttttattttttgtatagttttaataaa

SEQ ID NO: 558 - DNA, 2182 bp, Artificial Sequence
  chemically treated genomic DNA (Homo sapiens)
tttgttgaagttatgtaggaggtgaggaggggaataggaaattgtttgtaaaggagtttttgtgaggaagatttattttttttttgtttttttttaagttattatgatttttttattaagggttttcgtaagatcggggttttagggagataatttggtttttagttttggtatatttagtttcggttaggtatttttgtcgtaggtagatgaggcgttgcggtcggatcgttgttttcggtgttgaaaggtcgagggcgttcgcgcgagttttcggtgttgttatttagggtgttgagcgcgggtcgtcgtagttttcgaagttagtttattcgcgttagtttttcgtagagtttttttattcggtacgattcgttcgtttttcgttagtttgtagttgacgtggagtaggcggtataaattaagttcgcggggtatggaggttgttgtcgttgtagtagtttagtttgttcggggcgggaatttttttttttttttttcgtttttttagtatttatattttgttttttttttaatttttttttggataatagtattttaacgataatagttataataatagggttagaacgataggggaggaaaatttaatagtttaaatatttttgaaaattgtatcgtaaaatggaagaaagagggggttttattattgttttaaaagagtaagttattattcggtacgtattttcgtttttttttttcgtcgttttatttgtagggttttcgttttttttttttttagtagtttatttcgaaaatattttataaagtttttattagacgtgtatatacggaatatcgtattttaagtgtattaatatttgtatttatttaagtttattcggattgtttagttgttgttttttttgggtatgtagttatttcgagttagagttacgatttggggaggggggtttttatttgggtttttcgggagggttgtgtttttcgggtttttgtaggttgtaattgtggtggagtcgtcgagtagggagggaaggaaagatagcgtttgattttttcgaggtttcgtttttaatgtaacgtgagttttgtttttattaaagatggtcgttcgttttgacgttagtagtttttaatagtcgtttagcgaggggcgggaggaagtgggggcggggtacggcgggggcgggggcggggttcgggttgcggcgcgtttgattcggtttttagtgcgttggtttgtaaatttgcgtgtttttattttttataaatattcgtacggggcgatttttatgattttattttaatattcggttttgggtaaacgcgtttatttcgtaattgtatttttgatgttttttggtgtgtgtgcgtgtgtgtgtatatatgtgtatatgtgtgtgtatgtatatatgtatgtgtgtgtatattttataatatatgtataatatatgtataatttgtgtgtatgtgtatatatttttttttatttttatttttatttttttttagtggaatttgtggttgagttatttaaggagaggggaaggtagaggaggggtaaaaggtagtgatgggaggggtgggggaaattttagcggcgatttgtttttttcgaagagggttcgtaggggtattttcgtttattttcgttagttttatatatggttaggttacgtgggttgttatttttatgagtgattgttttatgttatcgaagtagcgtcgagggtttgtggttttcgttgttgtggttagtcgggtagcgaggttggcgtacgttattttgaattacgttagagttaggttttttgagttgttgtaggagtcgggggaaggagaagggaagcggagttagtttagttagcgtgggtttgtaaggattcgaggtttgaagttgagttgtttgtcgagggtaaaaacggatgattttgttttcggtggaatttgtagtcggtgttggggttttatgttgggtgttttaggggtattttacggaggtatagacgtttcgagggaatcgtttaaacggtcgggaggaggtgggggatttagagtaaggacggttgggatacggtcgaatttgggggtttatttagtgcgtaaatttcggggtattcgtgtaggttgtttcggggggttttcggatgtttaaattagggcggggagataaaggttatttgtgttggtcgtatta

SEQ ID NO: 559 - DNA, 2712 bp, Artificial Sequence
  chemically treated genomic DNA (Homo sapiens)
taatgaaagcgtttaatataaaacgaaattaaatattttttgtataggttttatataagtaaattcgaaaaaaagtgtgtgtgggggggtttatattattaattattatggcgaggaagataaagaagatatggatagaaggcggatggttttgcggtttggttttcgtagatcgatcgttttttttttttattcgagatggttcgtatcgaatttttttgttttttttttgggtttttcgggggttggattaatatatttgtcgatgttttggtcgaatggtaggcgatatcgggttttggatttttatacgtagtttagtatttacgaggttttaggtcgttggaagtttgtagtttcgcggacgatgaaagtttgttcgtaggtttttttggagtggtgagtttttgtcggaagggggcgtttacgtttttttaatggttttaatatattagtggaataaatttttaagattttatattttttgtttgttttgaatttattgcgagtgaaaaatagagaaaatttttaagtttaagtttttgatagtagagtgtgggagttagagtatggggagtttagaggttttagatttttaaaggtttttattagggttattttcgttagtggcggtggtagttttttttgtggttttttttttttttttaaggggttatttcgtattatgtcgtttttttttatttattttgttttttttttataggtttatttgcgttgaattttcgttagtttcgaagtcggcgagggagggggtttatttgttcgatcgttggtgggtttgagtttatagaggtagaggagtaagaatttgcgatattgaaagttatttatatggggtttttttgaaggaggacgtggaaggtagaaagtgatttgttttgagcggcgtatgtaatcgaggattttaagttggattacggggtttggacgattttttaaattaggaaatcgattttatttttttttttttcgttttttttttttgaatttttagttcgtatgtatttatattttttggtttttttttttagtttcgggtttttttttggtaaatagatttgtaggtgtttaagttacgttttatttttatttttttttaggagaggagatagggttaggattttattcgatcgcgggttataaatatttggttgcggcggtcgtcgcggggtttttaggagagttggtttcgggagggaaatgttttcgaggtagtggcggtcgcggtttattattaattgttcgttatcgattttattattcgttatcgattcgttgttcggagtttcggttttgcgggttgtttagattttaggtttgtgcgtttaatcgtggagaatgcgtcggtaggttttttatttttagtttaaggtgtaggaaggattagtacgaattcgttggttttgttgcgcggttaggagatgagttttatcgggtattgagtttaggtataggatattagagaatgaatatagaggtagaggtttttatgttttttttagagtttcggttttgtaaagagttcgtttgtttttagtttttagaatttcgtattgtgaatttgtttacgtggattgggaaaatagggttggtattattttgttatttcgtttgtgtttgggaagggttaagtatgtaaggttataaatatttattttattgggattttaaatgtttaataaattatgatttgttttggttagaattattagaaatattaagggaagatttagagagtttgggggaggaaattaatggtgaattatttaggtatttttttaaatttttttttttttggaaggaaggattgattaggggtagtttgttggttttatttttatacgatagaaaaattatcgtattaaggatgggtgtttttaagattagtgggtatattttatggggtggataaggagggaggaagagatagtttttataattgtttatttatttagttgttagttgagaaaaatgttaaacggatattatagttatataacgaatttgttcgtttttttttttttagtttttttgttgttattagggtgagaggtgtaatggaagggggtttgagagaaagtttttttgtaaagggatcgttttttaaatttatttataattagtttaatttatgaaagcggtttttaaagtgttttatagagttttagatagaaaatatgaggttaacgattatggtagttagtattggttatcgtgattattgttattgttaggatgaatgattatgattgggttaggttttttgggaattttggtggagtgggttgttatatggggtttcgtttttttgtatatattgggtatttaggtcgtttttgaggaatagtttagtagttagtggtttgggaagggtgttgtttttaggggttttttagtagagtttttggttttagtttgggtttggtaggtttttggtttttttaggatatttttattttcgttttttttatttaggtaaggagattttttaaggggtagcgttgttttttattttggcgagaatttttttttttttgattcggcggttttgaaattagatggtaatttggcgtttcgagaggttggtggttgtcgagattttgcgttttttgtttttggtgatgaatttgttagtcgtatattttcgttttagttttcgtaattgttttttgttgtacggaatgcgttttt

SEQ ID NO: 560 - DNA, 2712 bp, Artificial Sequence
  chemically treated genomic DNA (Homo sapiens)
agaaacgtatttcgtatagtaaggggtagttgcgggagttggagcgggagtatgcggttaataagtttattattaaggataagaggcgtaagatttcggtagttattagtttttcggagcgttagattattatttggttttagaatcgtcgggttaaagagaagaaggttttcgttaaggtgaagaatagcgttattttttaagagatttttttgtttgggtgggaggagcgaaagtgggggtgttttggggagattaggaatttgttaagtttaggttggggttaaggattttgttgagaggtttttagagataatattttttttaggttattggttgttggattgttttttaggagcggtttgggtatttagtatgtgtagggagacggaattttatgtgatagtttattttattagggtttttaaagaatttggtttagttataattatttattttgatagtggtaataattacgataattagtattagttgttatgatcgttagttttatattttttatttagagttttgtagagtattttagaaatcgtttttatgaattgagttaattatgaataaatttggaaggcgatttttttgtagggaagtttttttttagatttttttttattatattttttattttggtaatagtaggaagattgaggagaggggaacgggtagattcgttgtgtggttgtgatgttcgtttagtattttttttagttgatagttgggtaggtggataattgtagaggttgtttttttttttttttttgtttattttatagggtgtatttattggttttggaagtatttatttttaatacgatgatttttttgtcgtgtgaaaatgaagttagtaggttgtttttagttagtttttttttttagagaaaaagagatttgagaaagtgtttgggtaatttattattaatttttttttttaaattttttgagtttttttttaatatttttggtggttttgattaaagtaggttatggtttgttgagtatttgggattttagtgaagtagatgtttgtagttttgtatatttagttttttttaggtataaacggagtggtagagtggtgttaattttgtttttttagtttacgtagatagatttatagtgcggaattttggaagttggagatagacgggttttttgtagagtcgggattttgagagggatatgagggtttttgtttttgtgtttattttttgatgttttgtatttgggtttagtgttcggtgggatttattttttggtcgcgtagtaaagttagcgggttcgtgttggttttttttgtattttaggttgggggtggggggtttgtcggcgtattttttacgattgagcgtataggtttgaagtttggataattcgtagaatcgaagtttcgagtagcgggtcggtggcgagtagtggggtcggtggcgagtagttggtggtgggtcgcggtcgttattatttcgaggatatttttttttcggagttagtttttttagaaatttcgcggcggtcgtcgtagttaagtgtttatggttcgcggtcgggtgggattttagttttgtttttttttttgggaaggagtgagggtgggacgtgatttagatatttataaatttatttattaaagaggagttcgggattgagggaaaaggttaaagagtgtgagtgtatgcggattgggggtttaggggaagaggacgaggaggaggaagatgaggtcgattttttgatttaaaaaatcgtttaagtttcgtggtttagtttaaggttttcggttatatgcgtcgtttagagtaggttattttttgttttttacgtttttttttaaggaagttttatgtgggtagtttttaatatcgtaggtttttatttttttgtttttataagtttaaatttattaacgatcgggtaagtaaattttttttttcgtcgatttcggaattggcgagagtttagcgtagatgggtttgtggggagggggtaagatagatgagggggagcggtatggtgcggggtgattttttggagagaggaaaaaggttataagaggggttgttatcgttattaacggagatggttttggtagagatttttgggggtttggaatttttggattttttatgttttaatttttatattttgttattagaaatttaaatttgaggattttttttgttttttattcgtaataaatttagagtaaataaaagatgtggaattttagagatttattttattggtgtgttaggattattaaaaagacgtgggcgttttttttcgatagaggtttattattttaggagaatttgcgggtaggtttttatcgttcgcggagttataggtttttagcggtttggggtttcgtgggtattgagttgcgtgtgggggtttaggattcgatgtcgtttgttattcggttagggtatcggtagatgtattggtttagttttcgagagatttaggaagaaggtaaggaggttcggtacgagttatttcgaatggaagaagaaggcggtcggtttgcgggagttaggtcgtagagttattcgttttttgtttatgttttttttatttttttcgttataataattagtggtgtggatttttttatatatattttttttcggatttatttgtatggaatttgtgtaaaaaatatttaatttcgttttgtattaaacgtttttattg

SEQ ID NO: 561 - DNA, 2207 bp, Artificial Sequence
  chemically treated genomic DNA (Homo sapiens)
agattatcgtagtaggttttgtattaatttattgtaaaaaataattttaattgtgatggtattttaatggttatatataaaattatttttgaaatgtattttatgatggttgtttagggggaaatatattagttagtagatatggttaatgttatttttatttaatttaagaagtaataatagaattaatgaaaatagatttatattttaaagaaataaatataataaattgaaaaagaaggataaaagagattattggaaatataagaaattattagattgaatttatttagtttgtttaatttttttattttttaggaaaaaatttttgaaatttgtttttttggaaatatattatataatttaattataaggaaagtgatgttttaattataaattgttgttatgaatagtgtaaattttaaatttgttaataaatttattttaaattaaatttaagtttataatttagtaataattttgttaatttatttgtaaaattattattttaaagcgattgttttaagttaagttaaaaaataggtttatttatggtaagtggttagattttgtggatttatttatttttatttgcgaattaatatagtagttttgtaatattgatttatattaggaaattatataattagtggagtttgaattgataaataaaaatttggatatcgttatagataggatatgtagaagttgtttaattggtttgatttattttttgggttgatattttagtaatgtttttattttttaataatggtgagttttttagtatatgttgttatatagattaatttaattttaaaggcggggatttgattttttttgtttattaagagtttgttcgtttgtaagattttagcgtttttgtagtttttatttttttttattgtttttaatttttttttaggttttttggattcgtattttttaggcgattgtttgttagtttggggtgtgtgtgtgtgtgtgtgtgtttatgtgtgtacgcgcgcgcgataggggcggtatttatttttttaggtatgtaaggtttatttattttgatttgattttttgttatttttaacgaataggttaaacgagttttttcgggtttcgttaagtattttgtttgttcgaaagttttttttagggcgaagatttgttgttcggaaaaagtgggtttcgtgtgtttttttttttcgtttttgtttaataaaatggatttttgatttgtgagaattaataaataacgagagagggggaaaaataatcggttataagcggttgtattagggggaaaaaacgaattcgaaaaataatgttttgtggggaaagaaagtttagtttgtggcggatattagaagtgtagtggcgtttttagattaacggtacgtttttttttgtttttttatatttatttgttttttaaaagtcgcgtgtttggcgtagtagtaaatattttttgtttaatatcgacgttaaatagttagggagtttattgttaaagtttgttagagtttaatcgtaaggttttattaaattaacgattgttagaaaaaggttattttcgttttttaatttagtcggtgttcgttcggtttcggagtttttaagtgagaataattagattttttttttttttttttaacgtttttttaatttgtgtttaggtaataaaggggtttttgtttttgtatataagagagttaaatcgtttttaagtttaacgtcgttgtagtcgagggggagaggggaagggggagggggtatagtttttgttggcggtttttaatacggttattaaaatcgatataatagcgtttttttggtatttttattaggttcggttgttatagttttcgggttttttaagagaatttttatttggttttcgtaatttttcgtagttattgtcgtttagtcgtattaaggaggttcggagatttggaagaaatttcggagattcgttgaaaggcgaagaattgagcgagaaaaggattttaggttgggttttgaagtttatttggaaggttgggagttttcgcggcgttgcggtttattatttcgaagattagcgtgattttggggtaatttagtttgttttaagtaaggtttttgcgggatggtatattttttttaggtcgtgtttttttattttattttttttttggttcgtttttgtgttagggtgttgagttttacgatgt

SEQ ID NO: 562 - DNA, 2207 bp, Artificial Sequence
  chemically treated genomic DNA (Homo sapiens)
atatcgtggagtttaatattttaatataagagcgagttaggagaagagtgagatgaagggatacggtttggggaaaatgtattatttcgtaaagattttgtttgaggtaaattgagttgttttaagattacgttagttttcggggtagtaggtcgtagcgtcgcggaggtttttagttttttaggtggattttagggtttagtttggggtttttttttcgtttagtttttcgttttttagcgagttttcgaagttttttttaagttttcggatttttttagtgcggttgagcggtagtaattgcgggaagttgcgaaagttaagtggaggtttttttgggaagttcggggattgtggtagtcgggtttggtgggggtgttagggagacgttattgtatcggttttgatggtcgtattaggggtcgttaataaaggttgtgttttttttttttttttttttttttttcggttgtagcgacgttagatttgggggcgatttagtttttttgtgtgtaaaaataaggatttttttgttgtttggatataggttagggaagcgttgaaggaaaaaaaaaaaaatttagttatttttatttaaaggtttcggggtcgaacgagtatcgattggattaggaggcgagagtggtttttttttggtagtcgttaatttaatggggttttgcgattaggttttggtaaattttagtaataggttttttagttgtttgacgtcggtgttgagtagaaggtatttattgttgcgttaaatacgcggtttttaaaaaataggtggatgtaaaaaagtaaagggagacgtgtcgttagtttggaagcgttattatatttttggtgttcgttatagattgagttttttttttttataaaatattgtttttcgagttcgttttttttttttagtgtagtcgtttgtaatcgattgtttttttttttttttcgttgtttattggtttttatagattaaggatttattttgttggataaagacgggaagagaaaatatacgagatttatttttttcggatagtagattttcgttttggagaagattttcgaataaataaaatatttggcggggttcgagagggttcgtttggtttattcgttggggatgatagagagttaggttaaggtgagtggattttgtatatttggagggataggtatcgtttttgtcgcgcgcgcgtgtatatatgggtatatatatatatatatatattttaaattaataaatagtcgtttgggaggtgcgaatttaaggagtttggggagaagttgagagtagtgaaggagggtggggattataaaggcgttggggttttgtaggcgggtaaatttttgatgaataaaaggaattaagttttcgtttttgaaattaggttaatttatatagtagtatgtgttgggggatttattattattagagaataaaggtattattgaaatattagtttagagaatagattaggttagttagatagtttttatatattttatttgtagcgatatttaagtttttgtttgttaatttaggttttattagttatataattttttaatgtagattagtattatagggttattgtattaattcgtaagtaaaaataaataaatttataggatttaattatttgttatagatgaatttgttttttagtttagtttaaggtaatcgttttggaatagtaattttataaatgaattgataagattattattgaattataggtttgaatttggtttaaaataagtttattaatagatttaggatttgtattatttatgataataatttataattaaaatattattttttttataattgagttgtatagtatatttttaaggaaataaattttagaaatttttttttaaaaaataaagggattaaataagttgggtaaatttaatttaatggttttttatatttttaatagttttttttgttttttttttttagtttgttatgtttgtttttttggggtgtaagtttgtttttattagttttattgttgttttttaaattaagtaggaataatattagttatgtttgttggttagtgtatttttttttggatagttattataaaatatattttaggagtgattttgtatgtggttattaggatattattatagttaaaattattttttgtagtaggttggtatagagtttattgcgataattt

SEQ ID NO: 563 - DNA, 2460 bp, Artificial Sequence
  chemically treated genomic DNA (Homo sapiens)
tcggaaaggttttgtattagaggttaaagtatttggttttagtaaatgattaagtgtttgaaatagttagttttgtgttttagagaaatattttatatattttaaggttagtggggatttaattcgagtataaattagtaggattaaattatgatatatatatagagaatatttttttttttaaattagattttttgattttatagaattatttaattttttttgtttttattatgatttgtgggtatttgattttattgtttatggaattttagatttttttgtttgaaagggaagggacggttaggcgtagtggtttatgattataattttagtattttgggaggtcgaggtaggtagtttatttaaggttaggagttttagattagtttggttaatatagtgaaattttatttttattaataatataaaaaattagttaggtatggtggtaggtattcgaaattttagttatttgggaggttgaggtaggggaatcgtttgaattcgggaggcggaggttgtagtgagtcgagattgcgttattgtattttagtttgggtaataaaagcgaaatttcgttttaaaaaaaaaaagaagaaagaaaagaaaagaaaagaaaaaaagaaagggaagggattttttttgtttaaatgttatttttgggttaggttgttgtgttttttttttttaacgttggtgattagaaattttttgtttttttgttatggtggtgggtatggtgatgtggggtatagttgggagttttaggtttatacgggagatttaagattgtatttttttaggaataaagttagagttttcgtttaaatttttatatttagtttaggttttgattcgtagaaggttttttataaatgtttgttgaattgttttgcgttgttgggttacgcgaggaaaatggaattaagagttcgttgattcggagggttggtttcggcgtattattgattggttttagggttttgagtcggggatttaatttttcggtttttcgattttttcgttggtaaaatgaatttgatatcgttttgatcgtttttgtttagtaggggtgagttttattagaggttgaaggcgtgagaaaggtatagagcgttgtttaggtagggagttattcgggttgttatttttcgcgttcgttggagatcgtaagttaggagagttggtttagtcgttagtaattatttgcgtttcgaatataatatttgcgttttattttcgtataggtagatggtgtaatttggtcgcgtcgtattttttcgtattttattcgcggcggttttgtcgtgatagcgttcgcgttaggtgtcggtgtgtaggttggttcgggacgttgcgattgtagtcggtaggaattcgcgcgaggggaaaggggcgttgggattaggttatgggatgtttaaggtattttttttaagtttaagggaataaggttagttttttttggatttttaaaatttttttgaaaggagagtagggagtaggtattagttttttgcgttttacgtggagagattggggtttagagagacgaggtggtttgaggatggatatatatatattaagtgatgggggcggagggaagtttaagtttttaatttcgggtttattattttttttcgggttggtattgttttgattgtatagattagttgattcgttttgggtaagggtggaatttttttttttgtttagggttggttttgtttttttttatttcgtggttttgttatttttgtgttatttagtttttttttaaatattacgtttattttatatattttaaggttagtggggatttgagttaagtataaatttgtaggattaaattatgatatatatataaagaatatttttttttttttttttttttttttttttgagacggagtttcgttttgtcgtttaggttggagtgtagtggcgcgatttcggtttattgtaggttacgtttttcggatttacgttatttttttgttttagtttttcgagtagttgggattgtaggcgtttgttattacgttcggttaattttttgtatttttagtagagacggcgttttattgtgttagttaggatggtttttattttttgatttagtgatttgtttttttcggttttttaaagtgttgggattataggtatgagttatcgcgttcggtaaaagaatatttttttttaaaagtagattttttagttttattgaattatttaattttttttgttttttaagaatcgtggggagttgattttattgtttatggaattttaggtttttttgtttgaaagggaagggatttttgttgtttaaatgttattcgagttaagttgttatgttttttttgtagtttgtaattatttatgttggtaattagaaattttttgttttttttttattgaaatttattagttttttgaaggatttagtcgtttttat

SEQ ID NO: 564 - DNA, 2460 bp, Artificial Sequence
  chemically treated genomic DNA (Homo sapiens)
atagggacgattgggttttttaggagattgatggattttagtgaaagagaagtaaggagtttttaattgttagtataggtgattataggttgtaaagaggatatagtagtttgattcgggtgatatttagatagtagaagtttttttttttttaagtaggagaatttaaaattttatgagtagtagggttagttttttacgatttttggggaataagaagagttgggtagtttaatggaattgaagaatttatttttaaaaaaaggtgtttttttgtcgggcgcgatggtttatgtttgtaattttagtattttgggaggtcgaggggggtagattattaggttaggagatggggattattttggttaatatagtgaaacgtcgtttttattaaaaatataaaaaattagtcgggcgtggtggtaggcgtttgtagttttagttattcgggaggttgaggtaggagaatggcgtgaattcgggaggcgtagtttgtagtgagtcgagatcgcgttattgtattttagtttgggcgatagagcgagatttcgttttaaaaaaaaaaaaaaaaaaggaaaaaaaagtgttttttgtgtgtatgttatgatttaattttataggtttatgtttggtttagatttttattaattttagggtatgtgagatgggcgtggtgtttgggaggaggttgggtggtataggagtggtaaggttacggggtggaaggaggtaaagttagttttgggtaaaaggaagaattttatttttgtttaagacgagttagttggtttgtgtagttagagtagtgttagttcggggaggaatggtggattcggagttagagatttgggttttttttcgtttttattatttaatatgtgtgtgtttatttttaggttatttcgtttttttgagttttagtttttttacgtggaacgtagggagttgatatttgttttttgttttttttttagaggggttttaagaatttaggagaagttggttttatttttttggatttgagaggggtgttttgggtattttatggtttggttttagcgttttttttttttcgcgcgggtttttgtcggttgtagtcgtagcgtttcggattagtttgtatatcgatatttggcgcgagcgttgttacggtaaggtcgtcgcgggtggggtgcgggagggtgcggcgcggttagattgtattatttgtttgtgcggaagtggagcgtaggtgttgtgttcggggcgtaggtaattgttgacggttgagttagtttttttggtttacggtttttagcgggcgcgggaggtggtagttcgagtggttttttgtttggatagcgttttgtgttttttttacgtttttagtttttagtgagatttatttttgttaagtaagggcggttagggcggtattagatttattttgttagcgaggaaatcgagaagtcgagaggttaaattttcggtttaaggttttggagttagttaatagtgcgtcggaattagtttttcgggttagcggatttttaattttatttttttcgcgtgatttagtaacgtagggtagtttagtagatatttatggagaattttttacgggttagggtttgagttaggtgtaggggtttggacgggggttttggttttgtttttgagagggtgtaattttaaatttttcgtgtggatttgaggtttttagttgtattttatattattatgtttattattatggtagagaagtaagaagtttttaattattagcgttgggaaaagaggatatagtagtttgatttaggagtgatatttagatagagaaagttttttttttttttttttttttttttttttttttttttttttttttttttttttgagacggagtttcgtttttgttgtttaggttggagtgtagtggcgtaatttcggtttattgtaattttcgtttttcgggtttaagcgatttttttgttttagttttttaagtagttgggatttcgggtgtttgttattatgtttgattaattttttgtattattagtagagatggggttttattatgttggttaggttggtttggaatttttgattttaggtgaattatttgtttcggttttttaaagtgttgggattatagttatgagttattgcgtttggtcgtttttttttttttaagtaggaaaatttaaaattttatgaatagtagggttagatatttataagttatggtagggataagaagagttgggtagttttatgggattaaagaatttagtttaaaaaaaaaggtgttttttgtgtgtatgttatgatttaattttattggtttatgttcgggttaaatttttattaattttagggtatgtgaggtgtttttttggagtataagattggttgttttaaatatttggttatttgttggggttagatgttttggtttttggtgtaaggttttttcga

SEQ ID NO: 565 - DNA, 2493 bp, Artificial Sequence
  chemically treated genomic DNA (Homo sapiens)
ttttttatttattaaaatgttagttttttttgggtattaggagttggcggttatttgtttggtattggagggggtgggggtatggtttttggcgacgtataggattatagtagttagtgtataggttaatattttagcggaggagatttatgtaatattttattgtttttttaggagattttaggttaaggattagtatttaagagtatgaattttgtttggtattaattagaattgtgttgaggaggttgttttttaggttttaatgagatgatgtttgtttagataattattagggttttttttttgaaatataggttttttttgggggttggaggttttgttagtattttatgattttggaggtgtggaggtttttttgggggcggggggggtattgcgagtggtgcgtgtattgagttttgtttgttttagatttcggtatttttgttattttttttaagagtagagtttaggaatagagaggtatttttaaaaaggaaataaggagagttatgtgttagtagttaggttttgcgagggttggaggatagggtttacggtgttttttgttcgggtgagggttttatgtattagaagttgtttaggggattggtggtatttttttgttttgggttttttttttttattgaaagtaaggaggttggatcgtgtggttatcgaggttatttttggttagaatatgttagaatttttatgtagtagtgtatttgtaggaagttgttttaagttagagaatattggggcgttattgtttttttagcgttgtttttttgtttttagtttgtttttagttaaatgaaatgggatggttggttattgattttagtgtaaagaatggggtttgatttttgttttgggtatttgatgatgtgtttgcggtaaataggataagttattataggttaataggaatagggtgttggaagttatagagttttatatggtagaaggggtacgtatagggttttttttttattaattagtggtgtgtttttagggaatatgagaaggaggtgtagaatcggaagagaggtaagaggtcgagaggtcggttaaggaagtttattgttatgtttttttgtagtcggcgttttaagtttaaggtgggtggttgcgttgggtatgttgattttattttttagtatttttttggcgtagggggtaggtagagggagggtttggggtttttaggaagggggtggtatttttgttaatagtttgtttttttattcggaaaataggagttttttttttttttgttttttagtttttgttgttaggggttttagtcggttgagagttttttttcgttttttttaggggttttttgttttagtttgttttgtacgtttttttgttgggtggtagggttaaattgttgtagataagtattttttttttttagggggtttttgggggacggaaaggaataggaagtatgcgtatagtaggtgtttataggattgtcggttggatgtgatttaaaagtttaagatttgggggttatttcgggtttatttgcgggtgtattttaaatcgaggtggttacgaaaggtagggttgattgaatagttagggggtgttaggaggggttttggaggagggtagaggtagtgtgggttgatgatgtgttttggttttttcgggattgttttgttattttttttcgttatagtgatgggtttatttcgttataggtatgtatgcgtttttggggttcgtggtagggttttttttttttttgaggataggtgaggtaggataggatgggggaggagggtttggttttagtttcgggtgtggttttgattttttttttcgggtattgtttttggattttcgcgtgttgtggttacgagtttagttattaattgaatttgtttttttaggaggattttttgaatgaataggattttttgttgtagaattttgttggttggtttatattggttttacgttattttgaaaattttttttttgagtaggattgtgggggttgtaggagttttgttgattgaggagtggttataaggtagtgattgatgttttgtttgaggaggtttgaggagattatttttgttgaagttgggagaacggggtggtagggaggcggtgttggatttgatttttaaagtatacgttgtagaattttgatttagtaggtagtatggcggtttgtaaaatataaggatatttttatttaatattggcggtgatatttagaaggcgaggaagatagtggtttatttatttgtattttggaaggtttagattgggaaatggggatattgaagtttatttggtgtaggttgtaaagttgtgtatgttatttaatacgatttgtaattttttgagttttgaaaattgtgatgttttggatatagttttttttgaacgtttgttttatagttcggagttaaatttgtattttttttgaaagttgatggtggacggggatgttatggtgtg

SEQ ID NO: 566 - DNA, 2493 bp, Artificial Sequence
  chemically treated genomic DNA (Homo sapiens)
tatattatgatattttcgtttattattagtttttaagggggatgtagatttagtttcgggttgtagagtagacgtttaaagggaattgtatttagagtattatagtttttaggatttaggaggttataagtcgtattaagtagtatgtatagttttgtagtttatattaagtgggttttagtatttttattttttagtttgagttttttaggatataggtaaataaattattgtttttttcgttttttggatgttatcgttaatgttaaataagagtgtttttgtgttttataggtcgttatgttgtttgttgggttagaattttatagcgtgtgttttaggagttagatttaatatcgtttttttattatttcgtttttttaattttaataggagtgatttttttaaatttttttaaataaggtattaattattgttttgtggttattttttagttagtagaatttttgtagtttttataattttgtttaaaaggaagatttttaagataacgtaaggttagtgtagattagttaataagattttatagtagggaattttgtttatttaggaaatttttttggaaaggtaggtttagttagtgattgagttcgtggttataatacgcgaaggtttagggatagtgttcggaggagggaattaaagttatattcgggattgaggttaggttttttttttttattttgttttgttttatttgtttttaggggagggaggggttttattacggattttaggggcgtatgtatatttgtggcggggtgagtttattattgtagcgaggaggggtgataggatagtttcgagaaggttaaagtatattattagtttatattgtttttgtttttttttaaggttttttttggtattttttggttatttagttagttttgtttttcgtggttatttcgatttaaggtgtattcgtaggtgggttcggagtagtttttaaattttaggtttttgagttatatttagtcggtaattttatgagtatttattgtacgtatgttttttgttttttttcgttttttaaggattttttgggagggaagagtgtttgtttgtagtagtttgattttgttatttagtagagaggcgtgtaggataggttgaagtaggaagtttttgggaggggcggggaggaatttttagtcggttggggtttttggtagtagaagttgagagataggaagaaagggggtttttgtttttcgagtagagggatagattgttggtagaagtgttattttttttttgagggttttaaattttttttttgtttgttttttacgttaagggggtgttgggaggtggggttagtatatttagcgtagttatttattttgagtttggagcgtcggttgtaggaggatatggtagtgagtttttttggtcggtttttcggttttttgtttttttttcggttttgtattttttttttatgttttttgaaggtatattattagttaatgggggagaagttttgtgcgtattttttttattatgtgggattttatggtttttagtattttatttttgttggtttgtaatagtttattttgtttgtcgtaaatatattattaaatatttaaggtagagattagattttattttttgtattagggttagtaattagttattttattttatttggttaaggataagttgaagataggaaagtaacgttgggaaaataatgacgttttagtattttttgatttaagatagttttttgtaggtgtattgttgtatggaaattttagtatattttaattagaagtggtttcggtggttatacggtttaatttttttatttttaataggagaaggaagtttaggataaggagatgttattaattttttgggtagtttttggtgtataaaatttttattcgggtaaggagtatcgtgggttttgttttttagttttcgtagagtttggttgttggtatatgattttttttgttttttttttaaaaatatttttttgtttttaaattttatttttgagggagatgatagaggtgtcgaggtttgaggtaggtaaggtttaatgtacgtattattcgtagtatttttttcgtttttagaagagtttttatatttttagggttatgaagtgttagtagaatttttagtttttagggaaagtttgtattttagaaaaggggttttggtaattatttgggtaaatattattttattggggtttggaaggtaatttttttaatatagttttgattagtattaggtaaagtttatatttttaagtgttggtttttaatttgaaattttttaaaaggataatgaagtgttgtatggatttttttcgttgaaatattaatttgtgtattgattgttgtgattttgtgcgtcgttaagggttatatttttattttttttaatattaagtaggtaatcgttagtttttagtgtttagagagagttaatattttggtggatggagaa

SEQ ID NO: 567 - DNA, 2358 bp, Artificial Sequence
  chemically treated genomic DNA (Homo sapiens)
tgatttttttatatttacggatttttttagcgttttttattttagggaatttttgttaattaattaagttgaaatttggaaaaaattaagttaagtggcgtttttaataaacggagattatgtgagaaggtttaattttaagcgggggagggtatagaaattaataattggtttttaattaataaatatatttaggtatgttcgtaaacgtttgtatattttgtaagattaaattatatataaatttgtgtttttaggtttattacgtcgtaattaattattaaattattatgtttgtttttattgattgttttaaaaattgagaatgtataagaataatttggatttttttttgttaaaacgtagagttttgttttattttttgagggggaataaaatttttttttttttttttaaaaagttttgggggtatagaaaaatatcgttttatttcgaagtaaatttaatattatttaaatcgatgaattttaaattgttgcgttttgattggtatgtatattgtatatgggtttttgataattaagaagcgttaaaatagagggagggaaaaaaatagcggaagaagtaagtcgttgagtgtttcggtcgggattttcgatgttaggcgcgttcggtagtagtgtttgagggcgaaacgggttttaaagtgatttagcggaggtaggaaatttattttttgttattttttggattttgtgttttgtttttttagtttgtggggggcggagaggtggtttaggtggcgacgtttggttatttatattggtattttttatagttatttaaagaaggttttgttttttagtaataatatttttgtttttgtttttttagtattaatatttttgcgttttttatttttcggttgtattttttttatttttttttttcgagaggttcggttatcggttcgggagttgggtcggtcgttttgggagcggatgaggaaggttaggagaagtagcgagatagattttaattttataattttattttttttcggtagggtttcggcgttttgggttacgttgagagcgaacgtgggtcgagcggaggatatagagtaaaaagcgacgttcgttgtatatataaattcgtattcgttgttcgttcgggtattgtttgttttggttttcgttttttttcgaggttgggtaagtttaaaagttttcgaaaggggggtttaaagaggggcgtttagtgtacgtgatttcgttttatttagggtgttgggggtggggagattttttattggatttggtttttttagtagaattgttttattttttatatttatgtcgttttagcggtttcgagtgaaagaggtaagaggtttaaaggatagaaggaaaatttttttttgttaaaaataaataaataaaataaaataaaataaaatacgggttttttaaatttgaaaagttttaagggtagagtgggtgggggagtcgtaattagaatttttggttttagttttgtaagattcgtgtgtggatattttttcggggtttttgattcgttgttttttttttgtcgttgtaaaggagttgtgaggggggatttataggattcgatatttagttttagttaattaacgcggagtttagggtttagtcgcgcggtttaattttcgcgttgcgttgtttattggtttagaaaagtttttttcggttttgtttatggttgaaattggggttggagttggtgggggagagaagttttttcgaatttgggcgttttaggtttcgggtttcggatgttattgtttttaggtcgcgagaagagggcggtatttatgagacgtcgattagtttcgagattaaaaatttagttttgggtatttttaattatttgttatttagacgtttacgaataagttcgttcgtttttcgcggttttggggaattcggtgtttagtgcgtgaggtttggggcggtttgttggatttatttgggtagggacgatttataagtattgacggatagatagtgatggggtttaatttagtgtatgaagaggggcgttagtttttttatcgcggattaggttttagagagcggggttttagagtttagcgttaagcggaaagagagtgcgtttaggacgtacggtttgaatatttatttagtagcgaggagaaggaggtcgaggtgtcgatcgcgttttggaagtttttttttatttttaggtcgtttagtatgttcgggtcgggtcgggaggatttgtagaggagaagaaacgatgcgtttgacgttcgtgttcgttgggattcggcgttagtagttatcgtatttttgggaaagaattgagggagtgtttagggcgattagaattagt

SEQ ID NO: 568 - DNA, 2358 bp, Artificial Sequence
  chemically treated genomic DNA (Homo sapiens)
gttgattttggtcgttttggatatttttttagtttttttttaggagtgcggtggttgttggcgtcgagttttagcgggtacggacgttagacgtatcgtttttttttttttataggttttttcggttcggttcgaatatgttggacggtttaaagatggaggagaatttttaaagcgcgatcgatatttcggttttttttttttcgttgttgggtgagtgtttaggtcgtgcgttttgggcgtatttttttttcgtttggcgttgagttttggagtttcgttttttgggatttggttcgcgatagggaagttagcgtttttttttatatattaaattgagttttattattatttgttcgttagtgtttgtgggtcgtttttatttaaataaatttaataagtcgttttaggttttacgtattgggtatcgaattttttaaagtcgcgaggggcgggcgagtttgttcgtaggcgtttgagtggtaagtgattaaaaatatttagggttggatttttaatttcggagttgatcgacgttttataaatgtcgtttttttttcgcggtttagaggtaatagtattcgagattcgaggtttggagcgtttaagttcgaggaggttttttttttttattaattttagttttaattttagttatgggtaaggtcgagagagatttttttgggttagtaggtaacgtagcgcggggattagatcgcgcggttgggttttaggtttcgcgttaattaattggagttggatgtcgggttttgtgggtttttttttataatttttttgtagcgatagaggaggagtagcgagttaaggatttcggaagagtgtttatatacgggttttgtagagttgaagttagagattttggttacggtttttttatttattttgtttttggagttttttaagtttgggaagttcgtattttattttattttattttatttatttatttttagtaggagggagttttttttttgttttttaaattttttgttttttttattcggaatcgttagagcggtatgaatgtggaggatgagatagttttgttggagaaattaaatttagtgaggaatttttttatttttaatattttagatgaaacgaaattacgtgtattgagcgtttttttttgaatttttttttcgggaatttttggatttgtttagtttcggaagagagcggaagttagagtaggtagtattcgggcgggtagcgggtgcggatttatgtatatagcgggcgtcgttttttattttgtgtttttcgttcggtttacgttcgtttttaacgtggtttaggacgtcgagattttatcgaaagaaaatagaattgtaaaattgggatttatttcgttgttttttttaattttttttattcgtttttaaagcgatcggtttagttttcgagtcggtggtcgggtttttcggaaggggagaatgagaagagtgtagtcgggaaatggggagcgtaagagtgttggtattggggggataagggtaagagtgttgttgttgggggataaggttttttttaaatagttgtgaaaagtgttaatataggtggttaagcgtcgttatttgaattattttttcgttttttataaattaaaggaataaaatataaagtttaaggggtagtaaagagtggattttttgttttcgttgagttattttgaggttcgtttcgtttttaagtattgttgtcgaacgcgtttggtatcgggaatttcggtcgggatatttagcggtttgtttttttcgttatttttttttttttttttgttttgacgttttttagttattaaaaatttatgtgtaatatgtatgttagttaagacgtagtagtttggggtttatcggtttgaataatattaggtttgtttcggagtgagacggtatttttttgtatttttaggattttttaggaagaaaagagaaaattttgtttttttttaaaaaatagaatagaattttgcgttttaataaagaaaaatttaaattgtttttatgtatttttagtttttaaaatagttagtagagataggtatagtgatttaataattaattacgacgtaataaatttgagagtataaatttgtatgtaatttaattttataggatgtgtagacgtttgcgagtatatttgggtatgtttgttaattaaaggttaattattgatttttatattttttttcgtttggaattaaatttttttatatagttttcgtttattagaaacgttatttggtttgattttttttaggttttagtttggttgattagtaggagttttttggggtggggggcgttgggggaattcgtggatgtgaagggatta

SEQ ID NO: 569 - DNA, 2802 bp, Artificial Sequence
  chemically treated genomic DNA (Homo sapiens)
ttcgtatttttattcgtttcgttatttttttgttattttatttttgaaattatagttgttggtagggtttttagtttatgttagttttatttttttttttgttagtttttaaagggtttttaggtaatatggggggtttagttagagagtcggtatttttagttgttttttggttgagttggggggtagttttgggggtcgtggtttgtgttatggttttgttgatttaataaatagagttgtagagttttaggagagaggtgagtcggttgtaggggataggaggttttttttagaatggggaagggtatttttggtagagtttttcggagtaggtgagtgaggggaggagggtgtttgggagaggatggttagtatggggggtttttgggttttttggtttgtaaagttttaagggggtgtaagagagggttttcggtttggaagttaggggcgcggttattttaggaaaggaaattgttaaaggttaatgttttttatatttaataaattttggagggtagttagtattaatatttagggtgttgggaaaaggtgcgtgagagatttgaggtatttcgggggtaggggagggttgggaaggtaggttggttgggattttcgtattttaatttaattttgattttttttttatgagtagagtttcgatgttttggaagtttgggagaatggggagagatttcggaaaaggagagtagtgtttatttaaaaatagaagagtgaggtttttagggtgtagtaggggtgggaggtgattaagtagcgtggggattgtaagttcgagttagggtgagggtggaggttgttaatagtataacgggggaaagtggatgcggttgagattttttttttttttttttagagtagtattttgttttgtatttggtttttattaacgttatttttaagggtgagtattattttaaataatggttttggggaggggtaataattaggaattcgggttggtatttgggtttaaggggtttttataggtgaaagggaaagaattaaaaagtatttgagagtgttaagaagttttgatcgatatatttttatttttagatgatttcgatgtgatagaggtgatgtggtaattagtttttaggcgtgggagaggtttataggtttaaggatatggtgttcgaatttaggatgttggagtttatttgttgtatagttaggtaattttagttatattttgagttttatagagggtttttttggttttttattgagggtttttgatttttttatttatattaaatttagtagattttttttttttttttcgttagcgtttttgaggttttttagaattgagttaggttattttgttttttttaatattttttttttttgttaggttttgttttaagacgtgatttttattatgggttaggtggtgtttcgagaaggttaaggaaggtaggagattttatttcgatgtataagaagtatgtttttttattcggatcgggtttataatagttgttatagcgtaggtgagagtcgtgtgggtagtcgaaagtaggacgtttttgatcgggggtagtagtgtagggagttatcgttaggagggaggttggaaatttaaatagaggcgggtttgaggagtgaagtgtagaatgtcgggtttttataggaggtagaggaacggtggagttggagaaggtagggggaaatagggtatttggatggttgtgttttattgcgaatttattttttttttttttttaggtgttttttatttatattaaggggatattttgagtgttataatttttcgggtaagggcgaaatttaatttttttttatatggaatttttttggggtttgtgaaattgtgattgtgttataaaaagtggtttttagtttggaagattagggtgggtatatattggagatagttaagagttgagtatataaaggagagggaatgtgtaggaatagaggcgtttttttgggtttggtttttcgttttttatttttttttttttatttttattttttagattttgattttacggatattttgtttttgttttttatggagtttcgaatttttgcgtgtgtgtagatgaggggcgggggacgggcgttaggtattgtttagatttggtcggggtttattggaagtatttagaatagtattattatttagcggtcgttcgagggaagtattcgtcggttggtcgaagtttacgaagtcgttttttgttagggaaaatttttggttttttatgttatatttttttttaggtgttttttgtttttttattttataagaagttttattttacgtttttttttttatttatcggattttagtttttattattatttttagagatgtagttattatgcgttcgtttatagggggtgttcgacgatgacggtgttttcgtagttaaattatttttcgggttttaaggtttggtttttacgcgttttattgtttcggcgtggtaggttattttaagttttttcgggttggaattggtgtcggaggagtttcgggtgtatcgtacgttttggtgttggtgttgttttatttttttgagtttttttttttgattaagttttgtttaaagttaaataaaatagaatgaatgatatttcggttttattttttttattgtttcgttttagttcggttttcgtacggggatttttcgtttttttggtttttttgtggcgcgtttttcgtcggattaaggtattggggatgtcgttagggttaggttcgcgagcgcggagaagatagagcgcggcgtaaaa

SEQ ID NO: 570 - DNA, 2802 bp, Artificial Sequence
  chemically treated genomic DNA (Homo sapiens)
ttttgcgtcgcgttttgtttttttcgcgttcgcgggtttgattttagcggtatttttagtattttgattcggcggggggcgcgttataggagagttaggagggcgggagattttcgtacgaggatcgggttgaggcgaggtagtgggggaaatggagtcggggtattatttattttattttatttaattttaagtagggtttgattagaaagaagagtttagaggagtgaggtaatattaatattagggcgtacgatatattcgaggttttttcgatattagttttagttcggaagggtttggaatggtttgttacgtcggggtaatggagcgcgtgaaagttaaattttgggattcgaagagtaatttgattgcgaaggtatcgttatcgtcgggtattttttgtagacgggcgtataatagttatatttttggagatagtgatggaaattggggttcgatagatggagagaaggacgtaggataaggttttttgtggggtgaagaggtagagggtatttggagagaggtgtggtatggagaattaggggttttttttagtagagggcggtttcgtggatttcggttaatcggcgggtgtttttttcgagcggtcgttagatggtggtgttgttttggatgtttttagtgggtttcgattaggtttggataatgtttggcgttcgtttttcgttttttatttatatatacgtaagaattcggagttttatggggaatagaagtaagatattcgtaaaattaaagtttagggggtgggaatgaaaagggaaaagtgaggaacggggagttaaatttaggaagacgtttttgtttttgtatatttttttttttttatatatttagtttttggttgtttttagtatgtatttattttggttttttaagttgggagttattttttataatataattatagttttataaattttaggaaggttttatgtggagagaggttaagtttcgtttttgttcggggaattatgatatttagaatatttttttggtgtaaatggaagatatttgagaaaagagagaaagtagattcgtagtgaagtatagttatttagatgttttgtttttttttgttttttttagttttatcgtttttttgttttttgtaaggattcggtattttgtattttattttttagattcgtttttgtttaggtttttaattttttttttagcggtagttttttgtattgttattttcggttagagacgttttgttttcggttgtttatacggtttttatttgcgttatagtagttgttgtaggttcggttcgggtgggagggtatattttttatatatcggaatagagttttttgttttttttggttttttcgagatattatttgatttatggtgaaagttacgttttgaaataggatttggtagggaagggagatgttgaagaaaataggatggtttggtttagttttgggaggttttaggagcgttaacgagggaagaaagaagggtttgttgggtttggtatgaatagaggggttaggaatttttagtagggggttaaagaggttttttgtgaagtttagagtgtggttggggttatttggttatatagtagataaattttagtattttggattcggatattatatttttgggtttgtaggttttttttacgtttaagagttggttgttatattatttttgttatatcggagttatttggaggtgagagtgtgtcggttaggattttttggtatttttaggtgttttttggtttttttttttttatttataaggattttttgagtttaagtgttagttcgagtttttggttattgtttttttttaaagttattatttaaaatagtgtttatttttggaggtggcgttaatgggaattaggtgtaggatagagtgttgttttgaggagagaaggagggaattttagtcgtatttattttttttcgttgtgttgttggtagtttttatttttattttgattcgggtttataatttttacgttgtttgattattttttatttttgttgtattttggaagttttatttttttgtttttgggtgagtattgtttttttttttcgggatttttttttatttttttaggtttttagggtatcggaattttgtttatggaaagagggttaaggttaggttaagatgcgagggttttagttagtttgtttttttagtttttttttgttttcgagatgttttagattttttacgtatttttttttagtattttgagtgttggtgttggttgttttttaggatttgttaggtatgagaagtattaatttttaatagtttttttttttggaatggtcgcgtttttgatttttaaatcggagatttttttttgtatttttttgaaattttgtagattaggaggtttagagattttttatgttaattatttttttttagatatttttttttttttatttatttgtttcgggagattttgttagggatatttttttttattttgggaggggttttttgttttttgtagtcggtttattttttttttgaggttttgtagttttgtttgttgggttagtagagttatggtataagttacggtttttagagttgttttttaatttaattagagggtaattgagagtgtcggttttttgattgggttttttatgttgtttggaggttttttgggggttagtaagaaaggagatgaggttggtatgagttggggattttgttaatagttgtggttttaagagtggggtagtaaggaggtggcggggcgggtaagggtacggg

SEQ ID NO: 571 - DNA, 2301 bp, Artificial Sequence
  chemically treated genomic DNA (Homo sapiens)
tataataaagaaattagaatatttgggagtaaaatttagatttgggaattatttagggaaagtttgtttcgatttgtagtagagttttgggattgattttttaaattgtagttattttttatttttggttttgtgaaaaatttgagatttcggttttattagttttttttttgaaaaatagggcgtgttttagttttaggtatgtaaagttaaacgttttaaatcgttttgtattcgaattagttaatttaagaataagtttaatagtattgttaagtaagagtttaataatttagcgtttcgcgatattttttggcggcgttgatcgtttgttcgggatattggtttagaagtacggtatagggtgtttttatattttagaaattaagatagtttttaggttagaataaagtttattttggattgggtataattttattttatttttgcgattttttttttcgtttttcgttttttgtttttttttttttttttttttaatttttagcgcgttattttaacgttttagtttcgttcgttaagtttatgcgtttgggatttgttttttgaattttaagttcgaaaagttaggaattttcgattatggatttttttttgttaaattagagggagtgaaatttcgtttttttttttattttatttttttattttaaattcgttagattaagttcgttgattaggcgcgtatttaatggtagtattttttttaatattttttttattagagaggtaagtgttttatatttgtacgtaaaggtttttgagtggttaggtggagaggttcggatgtttttttttggagcgggtttcggggagttgtagtagttttagttttaggtattatagttaagcgagcgcgttttgggttcgttgttttgtacgtagttggaggtttgggtcgttgattttttggttacgtagttaattcgaggatgtgtgtttcggggttcggttttgtttcgggtgagaaggttagttattatttagggtgtaggtgttatggtttggaaatggtaatatttgagtaaataggtgggcgtcgtttttcggcggtgcggtggtcgttggttcgtagcgcgttttagttttcggcgtcgtcgtcgtttttttgttttgcggatttagttagttttcgggtggtttagttgggtggtttcgaggtttgtttttttgggttgcggcgggaggcggggattgtagtgtcgagtgtagggcgttttagtcgggttggcggtttacgttgcgttcgggtttttgtcgggagggcgttttggcgttaaattcgggcgggtaggggggtggagagtcgattgagtttatttttatttagaatttagaggttggtggagatagagagttttttaaatggatgtaagttttttgaaagtttgggtcggaagtttcgaaattttttgttacgtaaagttttagttagtttttagggttcggttttggttttttttgtgtaggttcggaagtgttcgttcggtttttttattgtttggaggggtttagggtcgcggatagattcggataaggtttcgtttatttttagtttgttttagttgattaatggcgggattggttgtaatgcgtgttttgagattttttttaggatttgttattttaattttgtaatatgaggtaaggttatgttttttaaagtggagatattttttttgttttttttgtttttttaaaggaagtatatttttttgatgtgttcgacgggatttgtagattttagattttattgtttttttttaaaattatatatttgaaaagaatatatttcgattgttgttaaaatttgttagatttttatgttttaatcgttggtaatgttttaataatggaattttattatttttgtacgtgttgttgaaaagagagttttttagtaaaagtgtcgtgtttatgagttttttgaggttgtgtaaggttatttattaaggattttaaaatgataggtaggttatttttggatttttaattatatgtttaaaatttaaagatttttagtttggagaggtttggttttgttttggtttggttttaaaagtttattttttttttttttttatttttaataatatagtatttaattgttttattaaattgttttaggttttggaattttggggaggtattttttaaatggtattgttttttttgtatttatgttaatataggaagttgtattagaaatttaagttgataatttaataaggtttgattaagtatatgaggtttttttaaaaaaattgacgtagtatatat

SEQ ID NO: 572 - DNA, 2301 bp, Artificial Sequence
  chemically treated genomic DNA (Homo sapiens)
atatgtgttacgttaatttttttaaaaaaattttatatatttgattaggttttattaaattgttaatttaagtttttaatgtaattttttgtgttgatataaatatagaaaaaataatattatttgaagagtgtttttttagggttttagagtttggaataatttaataaaataattaagtattgtgttattgggggtgggggggggggaggaatgagtttttaaaattaaattaaaataaaattaaatttttttagattgagaatttttgagttttgaatatgtgattggaaatttagaggtagtttgtttgttattttgagatttttgataagtaattttgtatagttttaagagatttatgggtacggtatttttattggagagttttttttttagtaatacgtgtaaaagtggtaaggttttattattaagatattgttagcgattaaaatatggaaatttgataagttttaatagtaatcgaagtgtattttttttaagtgtgtggttttgagaaaaagtagtggagtttggagtttgtaggtttcgtcgggtatattaagaggatgtgttttttttaggaaggtaggaaaggtaaagagagtgtttttattttaaaaaatatggttttattttatattgtaaaattaaagtgataaattttggagaaaattttagagtacgtattataattagtttcgttattagttaattaagataaattgaaagtaaacggagttttgttcgagtttattcgcgattttgggtttttttaggtagtgggaaaatcgggcggatattttcgggtttgtataaagggaattaggatcgagttttggagattagttggggttttgcgtggtagaaagtttcgaggttttcggtttagatttttaggagatttgtatttatttaggagattttttgtttttattagtttttaaattttgaatgggaataaatttaatcggttttttatttttttgttcgttcgggtttggcgttagggcgttttttcggtagaggttcgagcgtagcgtgaatcgttagttcggttggggcgttttatattcggtattgtagttttcgtttttcgtcgtagtttaagggggtaggtttcggagttatttagttgggttattcgggaattggttgagttcgtagagtaaaggggcggcggcggcgtcgaaagttggagcgcgttgcgagttagcggttatcgtatcgtcgggaagcgacgtttatttgtttgtttagatattgttatttttaggttatgatatttgtattttgaatggtgattagtttttttattcgaggtaaggtcgagtttcggggtatatattttcgggttgattacgtggttagagggttagcggtttagatttttagttgcgtgtagagtagcgagtttaaggcgcgttcgtttggttgtggtgtttgaggttggggttgttgtagtttttcgaggttcgttttaggaaaagatattcgagtttttttatttagttatttagggatttttacgtataaatgtaggatatttgtttttttggtggggaaaatgttggagagggtgttgttattgggtgcgcgtttggttagcgaatttaatttagcgagtttgggatggggaagtaggatggagaggagagcgaaattttattttttttaatttagtaggaggaagtttatgatcgaggatttttggtttttcggatttgagatttaaagaataagttttaggcgtatgggtttagcgaacgagattgagacgttaaagtagcgcgttaggagttgggaagggaggaaagaaaagatagaagacgggaaacgagaagaagaatcgtagaggtggagtggagttatgtttagtttagagtaaattttattttaatttagaggttgttttgatttttaagatgtagagatattttatgtcgtgtttttaaattagtgtttcgggtaaacggttaacgtcgttaagagatgtcgcgaaacgttgagttattaggtttttgtttagtagtgttgttggatttgtttttaagttggttaattcgaatgtagagcggtttgagacgtttagttttgtatatttagggttgagatacgttttgttttttaaaagggggattgataaagtcggggttttaagttttttataaggttaaagatgaggagtggttgtagtttagaaagttaattttaaaattttgttatagatcgaggtagattttttttaaatggtttttaaatttgggttttatttttagatattttgatttttttgttgtg

SEQ ID NO: 573 - DNA, 2328 bp, Artificial Sequence
  chemically treated genomic DNA (Homo sapiens)
ttttatttcgaataaatttggtgtttttgattttcgtttattttttagatacgcggggatttggggttggagttgatttttcgaggatattatagttttagtattcgagtttagagttacgttgtttttttttttgatgttttagggagcgcgcgagtagggagcggcgtgagtgttcgtttgtttgttgtcgggcggaattgagtttgaatttcggcggttggagcgttggttaggagggggcgaatgtcgaggtgcgggtagtttagcgggcgggaggttgggtcgaggttcgttttcgttcgtagtttagttatgtaaaagtgtttttgtttttcgggaataattaaatatttttgtttaaagtggtggcgtaaatggttagtcgttttgtggttacgttggatattagtagatgaggattattttgttttaattgggcgttttttattcgacgagtaagaaattgtttaggaggaagagggttttttgtttgcgcgtttttaggttttaagtgtgggtttcgcgttttgagggtttttgggcgtttggcgagggggagttgtgggttgcgttttttagcggaatcgggggtgtttttcgcgttgtttcggttaggtcggggtttgtagtcgagtcgattatcgagtggagtattgaacggcgcggattttgagatcgatttcggtttttgtttttggattttaaacgtttttattattgtttttgttttgttttttttttagttgttttagttttttttgcgcgttaggggttgggagggcggagcgtttttcggtcggtttcggtaggtgtttttaagatattcgcgttggttaaggagttttttgaatttagtttttgtttttatatttttttttttttttttgtagagaaggagtttttgattatgacgaataggtagttttgagttatttaatttattcgggttttttttttttattaatagtaattatagtagagaaagttttatttatttttaaagattttagttttttttttgaagagagtttttatttttttaatataaagttaatttttataataatattcgttttttttatcgtttattttttttattagggtaaagaaagtttaggatatttttcgtttttttatttgcgttcgcgtttttgtgcggtttttacggtagagttggggaggttattttacgtttgcgtagggagacgcgttcgtcgttggtgttgcgaaagattagagcgaagttcggttttttgttttttttttttaggggtttttttggggggcgtttttaggtttcgacgaattgagtattgattattgtggtggttaagtaaggaggggaggcgacgtcgggtttaagcgaattatagaggagaattggtaacgttgaatatagattttgtttgtaggcgcgatttggtcgggtttgagtttcgaatggggtttaattgcgaaggcggggtgggttttttagttatttagttttttttttttattcgttattattttatagttgtttgtaagtttaaggaatattaagtgtagaatgttgtatattttttttagttttaacgttatttagaaatggagattaatttttataaggtttttgtgagatttaagtaagatgaagtatattaaaatgttttgaaagttttgaatgttttttagtttagtgttagtattggagattgcggtagttattattatgattatttttatttttttttaggttttaagatttgagtaaaaggaagagttgggtgaattttttatagtttttaggttttgttttttcggttttcgttttttggtagttttttaattttttagtaggttataggcgtacgtggttggtagtttttcggttttcggttttgatagttcgggggtaattaggtttgtagttttcgaggaaatttttagttttttacgtttcgttttggattaggaattttttttttaataatcgcgtagtaagtggcgattttgggagttgaattggagtggagttcgaagtggttggggcgggtaaagattttcgttttattttgggatataattgggacggcgttttaatttttgtttgtaggcgtgtttttcgcgcgtattagtaagttttttatttatttcgtttgggtttttgtagcgttttgtcgtttaggttttagcgtttttattattttagtttttttttaatacgcggttttgtttttttttttagtattattgtattgtcgaaaataagttcggagattaacgtattttgtagggaagagaaggatatttgtatttttaagtttatttaagtaaaggttttta

SEQ ID NO: 574 - DNA, 2328 bp, Artificial Sequence
  chemically treated genomic DNA (Homo sapiens)
tggaggtttttgtttggataagtttggagatatagatgttttttttttttttataaggtgcgttagttttcgggtttattttcggtagtgtagtggtattggggaagaaggtagagtcgcgtgttgagaaggggttagggtagtagaggcgttggagtttgggcggtagggcgttgtaaaggtttaggcgaggtggatagagagtttgttggtgcgcgcgagaagtacgtttgtaggtagaggttgaagcgtcgttttagttgtgttttagagtgaagcgggagtttttgttcgttttagttatttcgagttttattttagtttagtttttagagtcgttatttgttgcgcggttgttggggagggggtttttggtttagaacgagacgtggggggttgggggttttttcgagaattgtaggtttggttgttttcggattgttagagtcggaggtcggggagttgttagttacgtgcgtttgtggtttgttgagaggttgaaaagttgttaagggacgaaggtcgagaagataggatttaggggttgtggaagatttatttaatttttttttttatttaggttttgggatttaagagggggtggggatagttatgataataattatcgtaatttttagtgttggtattgagttgaaaaatatttaaagtttttaaagtattttgatgtgttttattttatttgaattttataaaaattttgtgaagattgatttttatttttaaatggcgttgagattggaagagatgtataatattttatatttggtgttttttaaatttataaataattatgaaataatggcgagtgagagaaagaagttgggtgattgggaaatttatttcgttttcgtaattagattttattcgggatttaggttcggttaggtcgcgtttgtagataaggtttgtatttagcgttgttagtttttttttgtggttcgtttaagttcggcgtcgttttttttttttgtttagttattatagtgattaatgtttagttcgtcggggtttgagagcgttttttagagaagtttttgggaaggaagggtaaggagtcgggtttcgttttggtttttcgtaatattagcggcgagcgcgtttttttgcgtaaacgtagggtggtttttttagttttgtcgtggggatcgtataaaaacgcgggcgtaggtgggagggcggagggtgttttgagttttttttattttggtaaagaaggtaggcggtgagaaaagcgaatgttattatagaagttggttttgtattgagggagtaagagttttttttaaggagagggttgaaatttttaaaaataaataaaattttttttattgtaattgttattaataaaaaaagggagttcggatgaattaagtagtttaaaattgtttgttcgttatgattaggagttttttttttataaggaggggaaagaaaatgtgaaaataaaaattaaatttaagaagttttttgattagcgcgggtgttttggaggtatttgtcggggtcggtcggggagcgtttcgtttttttagtttttggcgcgtagaggagattaaaatagttaaggagaaagtaaaataaaaataatgataaaaacgtttaaaatttaaggataaaaatcggagtcggttttaaaattcgcgtcgtttagtgttttattcggtagtcgattcggttgtaggtttcggtttggtcggagtaacgcgggggatattttcgatttcgttggggagcgtagtttatagttttttttcgttaggcgtttaaggatttttaaggcgcggggtttatatttgaagtttgggaacgcgtagataggaaatttttttttttttaagtagttttttgttcgtcggatgagaggcgtttaattgaagtagaatgatttttatttattaatatttagcgtggttataaagcgattggttatttacgttattattttaaataaagatatttggttattttcgggaagtaagagtatttttgtatggttgagttgcgggcggaggcgagtttcggtttagtttttcgttcgttgagttgttcgtatttcggtattcgtttttttttggttagcgttttagtcgtcggggtttaggtttagtttcgttcggtaatagatagacgggtatttacgtcgttttttgttcgcgcgttttttgaagtattagaggggaaaatagcgtggttttgggttcgggtgttggggttgtgatgttttcggaaagttagttttagttttagattttcgcgtgtttgggagatgggcgagggttagggatattaggtttgttcgaggtgggg

SEQ ID NO: 575 - DNA, 2362 bp, Artificial Sequence
  chemically treated genomic DNA (Homo sapiens)
ttagtttttggagaaagaattttataaaggatgggaaattttaaataagtgtaatttattttgggttgatttagtgttttggataatgtgttttgttcggttcgtgttttagatattttttgtaggatatcgtagtttggagatttttttttttcgtaattgattttatatatttaggattattattttacggtagttgtgaatatattaagaggaagaaaataagtggtttattgaattgtagtttttttatttatatgtgcgtgattttttttttttgtaagaaggaaaaaaataaaacggtttttttggagagggttagggttttttaagtatgttagggattaaaagtgggaaattgggaaaatgtaattttaacgtgttttgttttttaacggaatttatgtttgtaaaatatattagaagtatagtgtttggttttgtaagttatttttgttgttgttttttttttgttacgtggaggtcggggggattgggggttggaggaggtgttttttttaatatgattgggcgtgtaatacgtttgtattaattttttatagttagatatgtgttttcgaataaaggagtagtggagataggtagagatgggggtttgatatagtttatagattttgtgttttaatagtattttataaatgatttgtttaattttaacgtttattattataagagatattggagtaaaatgagaaaattggagttatttgaattaattttttttggggagtgggggggaggggaattattaatttgaatatttgtattataaattaaatttagtaagtttgttttttataaatggatttgaagtatttattttttttaaagatgaaggttggagataaagtaatggattgaaatggaaagaaggatgttaagggtttgaaaatatacgggttttttatatcgatttttgttatgttatagtaatatatttttttttttgagaaaattgtgtacgttaaattttaaaaattaaatattgaaaggatgtgtaagtttaaaagggtttaatagggttagaattttgattcgaatatattaatttatttttaagtattattttggtttaaaggcgaggaggaaggtaggtagtaaagggagaaaaagagggagattattgaattatttaataaaagaggttatttattattttaatttattgtaagatatatatttttgatataagagaattttttagaggtcgaataaagcgtgtaagtatttttgagtaatgtatttgttttcggagagggggttcggaagtttaacgagggtttagcgaatagatttttgttaatttgtttatttttttgaattggagtcgggttgcgatgggttgcgatttttaggacgatatatttaattagaataaaatagaaaaaaaaaatgttgtaaaagtttattaaattgttgtatttgtgtttttgaatgtgggtggtattttttttaaaaggtaaagtatggtttgtgaaggagaaaggggaaaggggaggtgggagtggggagaaggggtcgtacgtatagtttggtaagggaagttttggttgagatttttcggttaaggaagggtttttagcggttttttagttagggttgcgacggagtagttatttgtttagagcgttttttttttttttttatttttattttttttaagattcgtttttttgtcggttgaaatttatcgttcgtgtttaaatttattttttagtcgttttttttttcgttttattaggaaatagtgggcgaattttgtattttaattttttttgttcgagtaggggaaggaaacggggttttaatttcgttttgaaacgcgtcgggttgattttattattattcgttagttagagaagggcgtggggggttcgcgtttcggatttaataaagagaagggggcgttttttttaacgttttgttaaagtataaggaaatttttttttttttttcggaagagacggtgttttattttatttcgatagaggggggaattttaggagaaagcgcgggattaattttttttttttataaggtagggaaattaaattttattttcgtaaaataaggttgagaatttttttttacgttatttatttacgaaaagcgagaggatttttgttttttagtaaaaatacggggaagagttttttttaaaaaaataggttggggtttttattaaaagggttggagatgtattttttttttttttaattcggttttttaggggatagttaaaaaatatttttcgttaaaaaatataagtgttatagagtatttatttaaatgatttttaattataaggatggagaagggatttgaatgaatttttattttt

SEQ ID NO: 576 - DNA, 2362 bp, Artificial Sequence
  chemically treated genomic DNA (Homo sapiens)
gaaggtgggggtttatttaggttttttttttatttttgtaattgggggttatttgggtgggtgttttatagtatttgtattttttggcggggggtgttttttagttattttttagaaggtcgaattggggaggggggagatgtatttttagtttttttgatgaaaattttagtttatttttttagagaagattttttttcgtgtttttgttaaagggtaggggttttttcgtttttcgtaggtaggtgacgtgagggaggatttttagttttgttttgcgggggtaaggtttggtttttttgttttgtagggagaggaagttggtttcgcgtttttttttggggtttttttttttgtcggggtaaaatggggtatcgtttttttcgggagagaaaaggagatttttttgtgttttggtagggcgttaaaggaagcgtttttttttttttattaagttcgaaacgcgggttttttacgtttttttttggttggcgggtgataatggggttagttcggcgcgttttagggcgaggttggggtttcgttttttttttttgttcgagtagaaggagttggggtgtagggttcgtttattgttttttggtggggcgagagaagaggcggttggagagtaggtttggatacggacggtgggttttagtcggtaggaaagcgagttttggagggaatgggggtggagaggggaagagaacgttttggatagatggttatttcgtcgtagttttggttggggagtcgttgaggatttttttttagtcggggggttttagttagggttttttttgttaggttgtacgtacgattttttttttttatttttattttttttttttttttttttttttatagattatattttgttttttaaaagaaatgttatttatatttagagatataagtgtagtagtttggtgagtttttataatattttttttttttgttttgttttaattaaatgtatcgttttgggaatcgtagtttatcgtagttcgattttagtttaaggaaataaatagattagtaaaggtttgttcgttaagttttcgttgggttttcgggtttttttttcgggggtaggtgtattatttaaaggtgtttatacgttttattcgatttttaaggagtttttttatgttagaagtgtatgttttataatgggttgggatggtaagtagttttttttattgagtaatttaatgatttttttttttttttttttttattgtttgttttttttttcgtttttagattaaagtgatgtttgagagtgaattgatatgttcgaattaggattttaattttgttgagtttttttagatttgtatatttttttaatgtttaatttttaaaatttgacgtatatagtttttttagaaaaaaaagtgtgttattgtaatatgataaaaatcgatgtaaaaggttcgtatgtttttagatttttggtatttttttttttattttaatttattgttttgtttttagtttttatttttgaagaaagtggatattttaagtttatttgtaggagataagtttattggatttgatttatgatgtaggtatttaaattaatggttttttttttttttattttttaaaaaagattggtttaagtagttttaatttttttattttattttaatgttttttgtggtgatggacgttaaaattgagtaagttatttgtaaagtattgttgaagtataaaatttgtaaattgtgttaagtttttatttttgtttgtttttattgtttttttgttcgaaagtatatgtttgattgtgaaaagttgatgtaaacgtgttatacgtttagttatgttggagggaatattttttttagtttttagttttttcggtttttacgtaataaggaaaaaataataatagaaatgatttgtagaattaaatattgtatttttgatgtgttttataagtataagtttcgttaaaagataaaatacgttgaagttgtatttttttagttttttatttttgatttttgatatatttagagaattttggttttttttaaaagaatcgttttgttttttttttttttataaggaaaaaaggttacgtatatgtagatgaggaaattgtaatttaataggttatttgtttttttttttttaatatgtttataattgtcgtagagtggtgattttaggtatgtaaaattagttacgggaggaagaaatttttaaattacgatattttgtaagaaatgtttgaagtacgaatcgaataaaatatattatttagggtattgggttagtttaaaatgaattgtatttatttgaagttttttattttttgtaaaattttttttttaggagttga

SEQ ID NO: 577 - DNA, 2568 bp, Artificial Sequence
  chemically treated genomic DNA (Homo sapiens)
gttttttaggggttgatcgttgtgtatttagtagggaagttgaggcgggcggtgttacgttttaggtttagggtttatatatttgttgggttagttttttggtgggtagtataattagggtacggatgtggtagattattttcgaaagtagggtttgagggggaaggagcgtttgcgttagtaaggttgttatttgttttttgtatattcgttgtagagaaaggggatttttatatagatttgtattatagggatgacgaaggttagtgtttttttattgtttgttggggtagaaatatagaggtcgttaggtcggtagttatttttgtttattagaaatttataggttgcgttttttaggagggtaggaattatagttgtttggattggatgaggaaaggcgagagagaagtcgtgtttacgtttaggtttaggtttgtcgtttttttgtttgtgatttttgggttgggttgttttgttggaggtttgggaatcgttttttagagggatggtattaaggtttagaggaacgttagttttaggagatttaagtgggaattatgagtttgagagtgttgagattatatttggtatcgatgtggtagggacgtttgatttacggttatttatagttttgtgtgtgggtgtttagggaggtgtttttttagttgtttgttcggggttggggtatttggaaagtaggacgagatgtcgtgtgttcgtagttgtttttgtaggttaggatggacgttagggatgttttcgataggaattaggttttcggtgatattttttttgatatagttaggtttagttagttattttggtaggaaaggttggatttgttattaaaaagaaagagaggttaggtgagcgttttttaggttttcgcgtagaagtttacggtggaaaaagttaggggagggaggttggggaaatttttgtcgtttttagtttttttttagttttaggatgcgttttttatatagtttttagaagttaaatagtaaaagtagatgttattttttgagtaaatttattttgtagttttttattaatttatagtggtatttattttttcgtagttaggaggttttgtgatttggcgttcgtttgttttagttacgtcggcgtttttgtttcgaggtttttgtttggtatttttaatttttaattttgatttggttttaagtttttgtattttaatttaaagagaattttttttatttgttttatttaaggtgttcgagtattttgttaaatttttcgttttttttatttgtttcgtcggaaatttttttatcgaaaattatacgtgttaagtaaaaatattaacggttaggagtttgtagaacggtttttgatttatttttgaggcggtgagcgtatagtaggaaatttcgtacgtttacgtaaatatattttgtagaattggcgcggcgcggcgggaggataggggtaagtttagtagaggaaacgggagttttgtacgtgtaggatttagatttttaggcgatgaaattgtagatttggtagcgaggcgcggttgtgattcgggaatattcgttgaacgaaatttttcggggcgatcgtcgtatttaagaattcgcgtagtttatttttttacgtcgattattttttcgttcgtcgaggtttattttcggcgttttttttttttcgaatttttttagtattaggtcggggattaggggttcggtcgttttttttagggtcggtttatttggggtcgtttcggcgttggcgttggtgttgcgttttttcggcgttttttcgttgttttttgcgttgggtttttttggcgttttttcgttgttttttgcgttgggtttttttggcgttttttcgttgttttttgcgaggtagatatttattcggtagcgcgttagtatcgagtcgtcggcgttttagagggagttcgttcgtttcgcggtttatttgcgttcgcgttttcgtcgttcgtttttcgtcgttttttttgcggcgttttcgggtttttcggtttcgcgtcgtttattcgtcgtcgtcgtcggggtcgtcgtcgttttttggtcgtcggttcggtcgatgtagtcgtttcggtttgcgcgggttttcgttgttgttgtcgttcgcgggttcggttttgtagtcgttcgagtagcgcgcgggttttgtcgtgcgtttcggttttcgcgtttttcggtttcgtcgtagttgtcgtatcggggttcgggtatcgcgcgacgtagaatagcgttatggttagtcgtacgtttgggattcgggcgtggcgcgttgcgatgacgtcggcggtacgtttgcgattcgggtttcgcgtaaaagatggggttggggtacggcgcgtagagatgacgtcgggttttacgcgtagtggtgacgttacgggagcgtcggcggttgagaattcgcgttgtttcgtgttgggggcggtatggagcgggagtcgggcgtcgcgggagttcgtcgggttttgggtcgtcggttggaggcggtgttggcgagtcgtagtgaggttaacgtcgtgttcgatattttggtcgtgttgta

SEQ ID NO: 578 - DNA, 2568 bp, Artificial Sequence
  chemically treated genomic DNA (Homo sapiens)
tgtagtacggttaggatgtcgaatacggcgttggttttattgcggttcgttagtatcgtttttagtcggcggtttagagttcggcgaattttcgcggcgttcggttttcgttttatgtcgtttttaatacggaataacgcggatttttagtcgtcggcgttttcgtgacgttattattgcgcgtagaattcgacgttatttttacgcgtcgtattttaattttattttttgcgcggagttcgagtcgtaggcgtgtcgtcgacgttatcgtagcgcgttacgttcgagttttaggcgtgcggttggttatggcgttgttttacgtcgcgcggtattcgggtttcgatgcggtagttgcggcggggtcggagggcgcggaggtcggggcgtacggtagggttcgcgcgttgttcgagcggttgtagagtcgggttcgcgaacggtagtagtagcgggagttcgcgtagatcgaggcggttgtatcgatcgagtcggcgattaggaggcgacggcggtttcggcggcggcggcgggtgaacgacgcggagtcggggagttcggaggcgtcgtagggaaagcgacggaaggcggacggcgaggacgcgggcgtaggtgggtcgcggggcgagcgggttttttttggggcgtcggcgattcggtgttgacgcgttgtcgggtgggtgtttgtttcgtagaaagtaacgaggaggcgttaggggagtttagcgtagggagtagcgaggaggcgttaggggagtttagcgtagggagtagcgaggaggcgtcgggggagcgtagtattagcgttagcgtcgaggcggttttagatggatcggttttggaggaggcggtcggatttttggttttcggtttggtgttgggggggttcgggaagaggaaggcgtcgaaggtgagtttcggcgggcgggagggtggtcggcgtgagagggtaggttgcgcggatttttaagtgcggcggtcgtttcggaagatttcgtttagcgaatgttttcgggttatagtcgcgtttcgttgttaggtttgtagttttatcgtttaggggtttggattttgtacgtgtagagttttcgttttttttgttaggtttgtttttgttttttcgtcgcgtcgcgttagttttgtaagatgtgtttgcgtgaacgtgcggggttttttgttgtgcgtttatcgttttaggagtaagttagaggtcgttttgtaagtttttgatcgttggtgtttttgtttagtacgtgtggttttcggtaaagagattttcggcgagataggtgaagaaagcgagaagtttgatagagtgttcgggtattttaggtagggtaggtggaggaggttttttttgagttgggatgtaaagatttgaagttaggttaaggttgggggttgggggtgttaggtagaggtttcgaggtagggacgtcggcgtggttggggtaggcgagcgttaggttataggattttttggttgcgggagggtgggtgttattgtgggttgatgggaggttatagagtgagtttgtttagggagtggtatttgtttttattgtttaatttttgaaggttgtatggaaagcgtattttggggttgagaaggagttgaagacgatagaggtttttttagttttttttttttagttttttttatcgtgggtttttgcgcgagagtttggaaagcgtttatttggtttttttttttttttgatggtaggtttagttttttttgttaaggtggttggttgagtttaattgtgttagaaggaatgttatcgaagatttggtttttatcgaggatatttttgacgtttattttgatttgtagaagtagttgcgggtatacggtatttcgttttattttttaggtgttttagtttcgggtaggtagttgagggaatatttttttgggtatttatatataaggttgtgagtggtcgtgggttaggcgtttttgttatatcggtgttaagtgtggttttagtatttttaagtttatggtttttatttgggttttttgaggttggcgtttttttgggttttggtgttatttttttggggagcggtttttaggtttttagtagagtagtttagtttagaggttataggtagggaagcggtaggtttaggtttaggcgtaaatacgatttttttttcgtttttttttatttagtttaggtagttgtgatttttgtttttttggagagcgtagtttgtgggtttttggtgggtagaggtggttatcggtttagcgatttttgtgtttttgttttaataggtagtgggaagatattggttttcgttatttttgtggtgtaggtttgtgtgagggttttttttttttatagcgggtgtgtagaggataggtaatagttttgttgacgtaggcgtttttttttttttaggttttgttttcgagagtggtttgttatattcgtgttttggttgtgttgtttattaaggagttggtttagtaggtatgtggattttagatttggagcgtggtatcgttcgttttagtttttttgttgagtgtatagcgattagtttttgggggat

SEQ ID NO: 579 - DNA, 2631 bp, Artificial Sequence
  chemically treated genomic DNA (Homo sapiens)
  unsure (1..197): unknown base
nnnnnnnnnnnnnnnnnnnnnnnnnnnnnnnnnnnnnnnnnnnnnnnnnnnnnnnnnnnnnnnnnnnnnnnnnnnnnnnnnnnnnnnnnnnnnnnnnnnnnnnnnnnnnnnnnnnnnnnnnnnnnnnnnnnnnnnnnnnnnnnnnnnnnnnnnnnnnnnnnnnnnnnnnnnnnnnnnnnnnnnnnnnnnnnnnnnnngaatttttaaatttgtagtttttttgttttgttttgttttgttttgttttttgttttgagatagagttttattttagttatttaggttggggtgtagtagtattatttgggtttatataattttcgtttttcgggtttaagcgatttttttgttttagtttttcgagtagttgggattataggtaggtgtttggttaatttttgtatttttagtagagatggggtttcgttatgttggttaggttggttttgaatttttgattttaagtgatttgttcgttttggttcgttaaagtgttgggattataggttttagttatcgtgtttcgtttaaatttgtagttttgatggaatgttttgattgaagattgaacgtagaaatagtattttgggttttgttgttgttatttttttttaattcggttttttattagtttattatgtattagaatttgagagaggtgattattttgttaataaattgttatatttaatatttttcggttgtttaatttagtgggaaatatagaaaaaaaggtaaagaggatatgaaattaataataaatgtattatttatatcggattggaatgttttttaatatttatttatttgagggttgagggtttgtggtagaagtttttaattttgtttttagggttttgaaattgtgtaatttttttttttttaatgtaatgagtatgtgtatatatattttttttttttaggggaaattttttataatttttattagattgataatcgttttagatttttcgataggttacgaattataatattagttttttttttttttttttatcggtttgtaaaaggatgtaatttttcgaatatagtttttgtatttatttgacgaggaaggagtttttattttaaataaaaatggcgggagttgttttatacgtagttttttacgtagaaagtttggaaggttttttttattttttttttattttcgtatttttgatttcggaaggatttcgttttttttatgttagattgttgtttagcgttaggtattagttgggaagttggcgtgggtaggttagttgtatttggtttggagttttaggtatagggttaggggcggggtggggtggagaggcgggcgggaggaagcggagagttgagcggttacgtagttggggtagaggtttcggggtaggggtggcgcggattttatcgttggcgttagttttcggagtgttaggtggagcggcggaaagttagagggtttacggtcgtgttattttgaatattttcgatttcgttttattttagaagttaagtagggtcgggtttggttagtatttgtataggaaagtaggagggtttttacgttagagggaggtttgtaaaggaagcgcggaattgggatgggttcgttattgttttgagttagaggaagggtttggacggtcgagttggagggatttttttttttggtgtttttggtaaagaaaaaggaagatagtagaggagagtttcgcgaggggttgttgtggggtcgggggagagcgcgttggaggtagggtagttggtgaggttttaggttcggtttggatgcgggtggttttgagtagggagtggtttttggatgtgaaagattattttgttttgtaggtgttttaagagaataatttagtacgggagtattgtggtgttaggtttttttgtaaagttgttaaattatttattttttagagggaagatttagtttgtttttgtataggattttgaaatttttattattgttgttttattgttgttgttattgtagttaaatatgtttgttttgtttaaagtgttagagttaggttatatagatttgtgttttacgttaattttttttttgatattttagatttttttttttgttggattataaagttaaagttgtaggatagaattttaagatgtttaagaaattgtttatgatatttatttttaattttttagtagttggaatgtagaggagtaagtaatattatataggataatatttttggttatgttttatagatttcgtttataaatttgaataattatgaaattttttttatgtttatttttattatgtttttgaaagtaaatgaaatgattagttttttgtttttttttttttagttttttaatgaataatgattaggtttggaattaatttttttagtaatattaaatgaaaaagaatgaggtagttagaatgtaaaaatagaggtttgttataatattttttttttttttttttttttttttttttgaggcggagtttggttttgtcgtttaggttggagtgtaatggcgtgatttttgtttattgtaattttcgtttttagggttttagaagtttttttattttagtttttcgagtagttgggattataggcgttcgatattatttttggttaatttttt

SEQ ID NO: 580 - DNA, 2631 bp, Artificial Sequence
  chemically treated genomic DNA (Homo sapiens)
  unsure (2435..2631): unknown base
aaaaaattagttaggagtgatgtcgggcgtttgtaattttagttattcggaaggttgaggtaggagaatttttagaattttaggggcggaggttgtagtgagtagagattacgttattgtattttagtttgggcgatagagttagatttcgttttaaaaaaaaaaaaaaaagaaaaaagaaaaaatattatgataaatttttatttttgtattttaattattttatttttttttatttaatattattgaggaagttgattttaaatttaattattatttattgaaaaattaaagaaaaaaaaataaaaaattagttattttatttgtttttagaagtataataaaaataaatatgaagggggttttatgattatttaaatttatagacggaatttataaaatataattaaaaatattgttttgtgtgatattatttgtttttttatattttaattattggggaattaaaaataagtgttataaatagttttttagatattttaaaattttattttgtaattttgattttataatttaataggaaggaaagtttgaagtattaaaaagaaaattgacgtgaagtataaatttatataatttaattttgatattttgaatagagtaaatatgtttagttgtaataataataataataaaataataataataaaggttttaaagttttgtgtaaaaataagttgagttttttttttggaaaatagataatttaataattttatagaaggatttgatattataatattttcgtgttaaattatttttttaaagtatttgtaaagtagagtaattttttatatttaaaagttattttttgtttaaaattattcgtatttaagtcgaatttgagattttattagttgttttatttttagcgcgttttttttcgattttatagtagtttttcgcggagtttttttttgttgtttttttttttttttgttaagaatattagaaaagggggtttttttagttcggtcgtttagattttttttttggtttagagtagtggcgagtttattttaatttcgcgttttttttgtaggtttttttttggcgtggggatttttttgtttttttatgtaagtattaattaggttcgattttgtttagtttttgagatgagacgaggtcgggggtgtttagggtggtacggtcgtagattttttggtttttcgtcgttttatttggtatttcgagagttaacgttagcgatggagttcgcgttatttttgtttcgaggtttttgttttaattgcgtggtcgtttaatttttcgttttttttcgttcgtttttttattttatttcgtttttggttttgtatttggagttttaggttaggtatagttggtttgtttacgttagttttttagttgatgtttggcgttgagtagtagtttgatatggagaaggcggagttttttcggggttaggagtgcgaaggtggagagaaagtggagggggttttttaggttttttgcgtgagggattacgtgtgaagtagttttcgttatttttgtttagggtagaggtttttttttcgttaagtggatgtaaaaattatattcgaagaattgtatttttttataaatcggtaaaaaaaaaaaaaaaaaattagtattgtagttcgtaatttgtcgggggatttagaacggttgttaatttggtaaaaattatggagggttttttttggaaaaaaaaaatgtgtatatatatgtttattatattaaagaaaaaaaagttatataattttaaaattttgaaaataagattaagaatttttattataggtttttagtttttagatgaatgagtgttaagaggtattttaattcggtatagatgatgtatttattattgattttatgttttttttatttttttttttgtgttttttattgaattaggtaatcgaagaatattgaatgtggtaatttattggtagagtagttattttttttaggttttaatatatagtaaattaatagggggtcgggttaggaaaaaataataataataaaatttaaggtattgtttttacgtttagtttttagttaaaatattttattagaattgtagatttaggcggggtacggtggttgaagtttgtaattttagtattttggcgggttaaggcgggtagattatttgaggttaggagtttaagattagtttggttaatatggcgaaattttatttttattaaaagtataaaaattagttaggtatttgtttgtaattttagttattcgggaggttgaggtaggaaaatcgtttgaattcgggaggcggaggttgtgtgagtttagatagtgttattgtattttaatttgggtgattagagtgagattttgttttaaaataaaaaataaaataaaataaaataaaataaaaaaattgtagatttaagaatttnnnnnnnnnnnnnnnnnnnnnnnnnnnnnnnnnnnnnnnnnnnnnnnnnnnnnnnnnnnnnnnnnnnnnnnnnnnnnnnnnnnnnnnnnnnnnnnnnnnnnnnnnnnnnnnnnnnnnnnnnnnnnnnnnnnnnnnnnnnnnnnnnnnnnnnnnnnnnnnnnnnnnnnnnnnnnnnnnnnnnnnnnnnnnnnnnnnnn

SEQ ID NO: 581 - DNA, 2470 bp, Artificial Sequence
  chemically treated genomic DNA (Homo sapiens)
ggtaggagaattgtgtgagtttagaagtttgagattagtttgggtaatatagttagattttattttaaaaataattgtgtatttttaatatttattgagtttttgttattttttggtttagtgtatattgttttatattttttagtaaatttaggagttatgtatgaattgaaattttggttaaatagtttggttaaagttatatagtttaggtgggggaggttgggtttaaaggtaggttgttgatgttatgatttatatttgaggttattgttggttataggttttatttgaggttttgtagggggtgaggggagaaattcggttttagagatagggtttgaattttttgttgttagttagtagagaaaatagttttttatttataacgtggggataatattgtttattatattaggtagtggaaagaattaaattaatttaaataaaggagatagtgtagagtatttgatacgtaataagtatttaatgagagttattattagaggtaattttttttgtttttagtttaatgttatgttttttattatttaaggtgattattttgttgttttttaaaatattatgtatggttttttttaagatatatgtaagtgtaaaatgtagaagaaaagtatgcggggacgggggcgggggggaagaaatttcgttttttttattgattagttttttttttaaaatatttttttaaggaattattaaatatttaatatggcgttgtattacgttattttaatttaaaaaaaaaaacgcgtattaaataacgaagtttttgtttttgggagtttatatataggttatgttaatatttgtaaagggtttcgagtgtttaagcggttaatgaacgttttgggtcggtttttttaaaatttagtttattgttttttcggtgagtacgattcgaagttttattttataacgtattgtagttcgaatttttttgttaataatcgttgaaattattagaggttaaagtaattaatatgagatgtaattttatcgtggcgtagtttcgcgcgttttcggttgttgcgattcgggaggggggagtttcggagcggttgcgttcggtttcgtattttcggtagagtaggttagttttttttgggtggtaagtttttgtaaaataaaatcgaaaatgagcgttcgtttttttgatagttttgtttaaaagaatttcgtttatattgtaaaattttattaggtatataagttcggtcggtattgttatttttagcgtgattttaatttatatatttaaagaatatttgttcggagtatgggatttggtagaaaggttaggtttttttcgaaggaagtttaatttaggatttttttttttcggtgttgtatatattattaacggtaaaatttttttttttagttgtagatttagatttgttgagaaaggtgttggagatgtttttaaggttatttttagtatcgcgagtttagttttttgtattacgtagatttttaagaggagatgtttatcgttcgtggggagttaaaattagaattttagttttttttgtgttgttattttattggtaagaatttttatattgtagatgtattgggtgtttagaattttatcgatgattttattatggaaagttattaataagttttaaattagagatttgttttggaattacggagtagggagtaagggagaaattgttattttttttttaaacgttcggatttagtataagtatagaacgtagtggttgtaggttcggtcgtgtttttaatagcgttgatagttggattggcggacgtattttagtattattgttaggaattaatacgtttttaatttttattgtatttttttatttttgtgtgaaatggagtggaatgttttttttagcgtttatttttaaagggagaagaattattttttattatgtgaatattttacgggggatttttattaaataaaattgtttgatgatgatttaatttgtttatttaagagaagaaattttttttatttatatattattgttgttatggttttcgttgttaaattatatataaaaagttttagttgaattaagtttattttagaaataaaaatgtttttgggatatgaattttaatgagatttttattttaaattgcgtttgaaaatatgtattgtttttagtgtttttttatatttttattaatttgttgttttaaatgtattttaaaaaagttataaaatgtatttttttataatgtgttttaggtttgtttgttgtttttttggttttaggttattttttagtgattagaaaataaaatgtgtagttaaaagaggttttttaggttgggcgtagtggtttacgttagtaattttagtatattgaaaggttaagaagggtagattgtttgagtttaagagttttttataatgtagtttttttataatgtttagatttttgttttatttacgtat

SEQ ID NO: 582 - DNA, 2470 bp, Artificial Sequence
  chemically treated genomic DNA (Homo sapiens)
gtgcgtggatgggatagggatttagatattgtaaaaaagttgtattgtaaagaatttttgggtttaggtaatttgttttttttggttttttaatgtgttgggattattggcgtgaattattgcgtttagtttggaaaattttttttaattatatattttattttttggttattaaaaagtaatttaagattaaaaaggtaatagataaatttagaatatattataagaaaatgtattttataatttttttaaaatgtatttaggataataaattggtgaaaatataaggaagtattgaaaataatgtatatttttaggcgtaatttaaaataaggattttattaagatttatgttttaagaatatttttatttttaaaataggtttggtttagttgaggttttttatgtataatttaataacggaaattataataataataatgtatggataggaagagtttttttttttgaatgaataaattaggttattattaagtagttttatttaatgggaatttttcgtgaggtatttatatagtgagaaatagtttttttttttttagagatgaacgttgaaaagaatattttattttattttatataagagtggaagggtgtagtgaaaattgggaacgtgttaatttttgatagtgatgttggagtgcgttcgttaatttagttgttagcgttgttaggagtacggtcgagtttgtagttattacgttttgtatttgtgttaggttcgagcgtttgaagaaaagatagtagttttttttttgttttttgtttcgtggttttagagtaggtttttgatttggagtttattaatagttttttataataagattatcgataaaattttgagtatttagtgtatttatagtgtaagaatttttattagtagggtgatagtataaaggaaattgaggttttaattttgattttttacgggcgataggtatttttttttaaaaatttgcgtggtgtagaaggttggattcgcggtgttggggatgattttggaaatatttttagtattttttttagtaagtttagatttgtaattgggaggggaggttttgtcgttgatggtgtgtgtagtatcgggggagggaaattttgagttgaatttttttcggagagagtttaatttttttattaggttttatgtttcggataggtattttttgaatgtgtaaattgaagttacgttaaaagtgataatgtcgatcggatttgtgtatttaatgggattttgtagtatagacgaggtttttttaggtaagattgttaggagagcgaacgtttattttcggttttgttttgtaaaggtttgttatttagggggagttaatttgttttgtcgggggtgcggggtcgggcgtagtcgtttcggggtttttttttttcgggtcgtagtagtcgggggcgcgcggagttgcgttacggtgaggttgtattttatgttaattgttttaatttttggtagttttagcggttgttggtagaaagattcgggttatagtgcgttatgggataaggtttcggatcgtgtttatcggggaaataatgggttggattttgaggaaatcgatttaagacgtttattagtcgtttagatattcggggttttttgtaaatattaatatagtttgtgtataaatttttaagggtaggagtttcgttgtttggtacgcgtttttttttttaaattaaaataacgtagtgtagcgttatgttgagtatttaataattttttgagaaagtattttgggggaaaggttgattaataaagaaaacggaattttttttttttcgttttcgttttcgtatgttttttttttgtattttatatttatatgtattttagagaaaattatatataatattttaaagagtaataaggtgattattttaagtgataagaaatatggtattagattgaaagtagggagagttatttttaataatagtttttattgagtgtttattgcgtgttaggtattttgtattgttttttttatttaaattaatttaattttttttattgtttggtgtggtaggtagtgttatttttacgttgtgggtgagggattgttttttttattggttggtagtagagggtttagattttgtttttggggtcgggtttttttttttattttttatagggttttagatggagtttgtggttagtagtagttttaagtatggattatagtattagtagtttgtttttaaatttagttttttttatttgagttgtgtgattttgattaagttatttaattagggttttagtttatatatagtttttgggtttgttaggagatatagagtaatgtatattgagttaggggatagtaggggtttagtgagtattagaaatgtataattgtttttgagatggggtttggttatattgtttaggttggttttaaatttttgggtttatataatttttttgtt

SEQ ID NO: 583 - DNA, 2359 bp, Artificial Sequence
  chemically treated genomic DNA (Homo sapiens)
taagtttatatatgaaatgaggttaataattgttttgttaatttgttgagaatattaaatgagataatgtatataaagtgtttttgtataaaatttggtatataaatatgtaaattaattttttaataagataatgtataattttggtataatggtagtttaattaatagttgttatttttttttagggttaagattgtaatttttttttattgtttaaagaataagatgagtgggtgaaaatatgtatataaattaataaaacggttgttttattaggtttgtagaaatattgaaagatatacgtttttagatatattttttttaattaaattttaattagaagtttaggattattgaggtataaaagaaggacgggatttaaatgagcgaagtaatttttcgggttatagttgtaaagttaatataggaatagagtggagttagtatagtaaaggttttaagaaaatggagtttggagttaaattgtttgtatttgaattttgtttatattttttattcgttttacgattttgggtaagttattaattttattttttttttgtatgttaattttaaaaaggggcgggatagagaggtggggtgtagtttatataataatagtgtttattttatagagttatgagaagtagataatatttgtaaagtgtttagaatagtgttgggttggtatatagtagatgttatttatttttttaaaaaattcgatagtagtaagagtttttatattatgtgagttagattaagaaaggttgtggtatagtttaaaattatttttgtttattttttaaaataagtttatagtagagaataagatatcggaaaatataaatatttttttatattcgaatttatttgaattttaagatgtagatacggagagtttagagtgttattagtatagggtagagaggttgaagagtttaggaatagatatagggtgggggaaaggggtaggggtaacgacgttgatttttggttaataaagtttttttaggttgcggagtaattttttttgttttttatttgttcggtttatttttggttaagaagattttgtcgttaaatttttatatttagtttaggtcgtagtgtatagattggttttttcgaagttttttagcggtagttcgatttcgaagtttatcgaggtattcgtgagaggagatgttatttagcgtagattatatttgttttgaatttttgataatcgtagtttaaagaatgataaattataaaggtcggaaatgcgttatcgcggttcgtttttcgcgaaatagcggtttcggttgtgttttttttaggaaggtcggaggtttttatatttttgtggtcgttattttgaatttcgtttgtagttttaagtgagatattaggtgatatattgttttttacgcggtaatataataacggttaatatagtgttttaatacgtattaatttattatttcgtataataattttgtgagttaggtataattatttttatttaataggtgaggaaattgaagtatatttttatatttattagttgttattttttgtaaagaatatttttttttttttttgtcgttttattttattacgatgaatttatggatttttttataaataattattgttattattatgttgatgtttaaattatttaaaatttggttagttggagtttttttatattgtttttttttttttttttttttgataaagtttttaggttggagtgtagtggatgcgattttagtttattgtaattttcgtatttcgggtttaagtgatttttttgtttcggttttttgagtatttgggattataagaatatattattatgttttagtgaggttggttttgaatttttgttttttaagtgattcgttttttcggttttcgaaagggttgggattatagaagtgagttatcgtattcggttataaataggtttttatgttttttgataagtttttaatagtttttgtgtattttatttttttataaaagatattttagttttattttatattatttttattttaaatttagaattattattgttttatgaagttatagtatattagtgaaaaatggtatatagaaattaagatttggatttcgggtaatgaataattttattgttattgtgtttggtattggtttttgttagtttattgtgtttagaattggttttttttagtgggtttttgttttgattttaagaatgaagtcgcggatatttacggtgagtattatagtttttaaagatggtgtgtttggattttgttttttttgttgtttagatgcgtttagagtttttttttttcggtgggttcgtggttttattt

SEQ ID NO: 584 - DNA, 2359 bp, Artificial Sequence
  chemically treated genomic DNA (Homo sapiens)
aagtgagattacgaatttatcggaaggaagaaattttggacgtatttgaatagtagaaggaataaagtttagatatattatttttaagaattgtaatgtttatcgtgagtattcgcggttttatttttgaagttagagtaggaatttattggaaggagttaattttggatatagtagattggtaggaattaatgttagatatagtagtaatgaggttatttattgttcgaaatttagattttggtttttatatattattttttattgatgtattgtagttttatgaagtaatggtgattttaggtttagggtaggaatagtataaaatgggattgaaatattttttgtgagaaagtgaagtgtataaaaattgttgggaatttattaaaggatatagaaatttgtttgtggtcgggtgcggtggtttatttttgtaattttagttttttcggaggtcgagggagcggattatttgagggataggagtttaagattagttttattaaggtatagtggtgtgtttttgtaattttagatatttaggaggtcgagataggaggattatttgaattcggaatgcggaggttgtagtgagttgagatcgtatttattgtattttagtttggagattttgttaaaaaaagaaaagagagggagtagtgtgaaagggttttaattgattaaattttaaataatttgagtattaatataataataatagtaattatttgtaaaggaatttatgagtttatcgtgataaaatgagacggtagggaaaagaaagggtattttttgtaggaaatggtaattaataaatgtagaaatgtgttttagtttttttatttgttaaatggagataattgtatttaatttatagggttgttatgcggggtaatgaattaatacgtgttaaaatattatgttggtcgttattatattgtcgcgtggaagataatgtgttatttagtattttatttaagattatagacgggatttagagtgacgattatagaggtgtggaaattttcggtttttttagaaggaatatagtcggaatcgttgtttcgcggagagcgggtcgcggtgacgtattttcggtttttgtagtttattattttttgggttgcggttgttaaggatttagagtagatgtgatttgcgttaggtggtatttttttttacggatgtttcggtgagtttcggagtcgggttatcgttgaggggtttcggaagggttagtttgtgtattgcgatttggattgggtgtggggatttggcggtagggtttttttggttagagatgggtcgggtaggtgaagggtagaggaggttgtttcgtagtttggaagggttttgttaattaaaagttagcgtcgttgtttttattttttttttttattttatgtttgtttttgagttttttaatttttttgttttgtattgatggtattttgaatttttcgtatttgtattttaggatttaaatagattcggatatgaagaaatgtttgtatttttcgatgttttattttttattgtggatttattttaaagaatgagtagggatagttttaaattatgttatagttttttttagtttaatttatatagtataaaggtttttgttgttatcgaattttttaaaagaataaatagtatttattatgtgttagtttagtattgttttaagtattttataaatattatttgttttttataattttatgagatagatattattattatgtagattatattttatttttttgtttcgtttttttttaaaattaatatataagaagaaaatgaagttagtaatttgtttaaggtcgtagagcgagtaaggggtgtaggtaggatttaaatataggtaatttggttttagattttatttttttaaaatttttgttatgttaattttattttgtttttatattagttttatagttataattcgggaagttatttcgtttatttgaatttcgttttttttttgtattttagtagttttgggtttttagttaggatttgattggagagaatatatttgaagacgtatattttttagtgtttttgtaaatttgatgaaatagtcgttttattggtttgtgtgtatgtttttatttatttattttgttttttgagtaatagaaaaagattatagttttggttttaagggaaagtagtaattattaattaaattattattgtattaaaattgtatattattttattaaaagattaatttgtatgtttatatgttaggttttgtgtaaaaatattttgtatgtattattttatttaatatttttaataagttggtaaggtagttgttgattttattttatatatgagtttg

SEQ ID NO: 585 - DNA, 2428 bp, Artificial Sequence
  chemically treated genomic DNA (Homo sapiens)
ttggttttagtataaaagttggagtttataaaattgagtttattataaggaagtatatttataattgtttattgaggaagtggggaaagaaaaggaaggagaatgaagaaaaggaattatttttggtaagtagtaataaagaattatgtgttttggtgttgtttttattttttttttgattagtgatatttttgtttttaattttttatgattcgtattaagttagataggtataaaatattgatttttatttatatggtattttatttaaatagttataatgggatgaaattttaaaattttatggattgtaaaaatatttatttaaaaggaattaaagttggtataatatattttgtttaaagattaatattagttttaatttattttatttgtattttttaaaattagtttaatttttatggtttaatgttagttaaaaaatattatagtgaagaattattagtaaattgttaataggtatgggatttttttgaggagtgatggaaatgttttggaattagatgtatgtaaattatggtttttataatttaatgaatatattaaaatttatttaattgtatattttaaaatgataaattttatgtgaaatatatgttaattaaaaaaattagtagtggttattaatagtttttaaagttaaaaatgttttgtttttaatattttttttgaggatatggagaaatacgatatttatttttaattaggaacggagagttttttaagtttgtatttaaaatagagagtattaaaaattttacgatttagacggttttttttttggtttttttttttttttgataattatgttttttttttttttttttatgttttttagttttatttaatatcgttggttaaataagaattatattttaaaatatataacgtattttaaattgacggagggttttttttttttattagtttaattcgttttaagttagaattattttatgggtgtgagaattgttggttttaagtttgttttttttagatgtttttgtattaagttagcgggattttgttttaatatgaaaatatagttgaattagttttttaaaagggaatggatatagagttttaattttgtttattttagggtaagtattataagttaaatttaggttgaaaaattaagtaaacgaataagaagtggattaatttttagagaatttgttataatttggtttttgtttatttttttattttatgttttaagacgttttttcgtttttaggtattttgttttattatttgtttcgttttttttgttatttagagatagtttttgtacgtgtttttttttttggttaggttatttttttttttttagtttcgttgatttttatttattttttacgttttttcggattaagttaaaatattcgagggagttttttaattatcggcggtgtttttaggggtatattaatagacgttgagaaattgagggacggcggaaaattattttttagtagaggaggttttagggtattttagaggtgattttattcgagtttttttggagattttaggaaagttagcggcgggattgcgggatttacgcgttcggcgttaagggagggtttaggtattaggcgggcgtttgggcgtacgggtacgcggagatttggtgggttaggagagggatgttgggtcgtaggatcgcggttcgttcgttttttttaggtttgcgtttgtcgtttgtcgggtcggttagagggagtagtttcggcgagttacgttttttttgttcggattttacgttttatttttcgtttcgtcgtttttcgtatatttattattcgttcgtatcgaaaggcgcggtagatcgagtaggagtagcgtcgtcgtttagagttcggggaggcgtttgtgttaacgggtaggcgggttgggtttttcggtagttatggttcgggagtgcgcgggttagcggattcgggtgagggttttggttgcgtttggggttgtttaggttattgtttagcgtgcgttattcggttttgcgttttgcgttcggtttacgaatcgtaggtttcgcgtcgggcgcgtcgagagggaggagcgcggagagtcgggggaggttcgggacgtagagtcggagcgtttgggtcgtcgaattttcgggggttttttttgtggcgtcgaggaggcggttgtaattcggtttcgttttcgcgttgggtatttggaaatttcggtgttaaaaggggttgcgttgggtcgcgcgttttgcgggtatagcggggcggagggcgagggcgtagggaggcggggagagtagttagtcggtcgtaaggagttttcgttcgtttgggggatttttggcgagagggtgacgtagtttgataggcggagttttttcggtagggtcgttagataacgagtgtttaattttgtt

SEQ ID NO: 586 - DNA, 2428 bp, Artificial Sequence
  chemically treated genomic DNA (Homo sapiens)
gatagagttagatattcgttgtttaacggttttgtcggaggggtttcgtttgttagattgcgttattttttcgttaagggttttttagacgggcgggggttttttgcggtcggttagttatttttttcgtttttttgcgttttcgtttttcgtttcgttgtattcgtagagcgcgcggtttagcgtagttttttttggtatcgaggtttttaggtgtttagcgcgaaggcggagtcgggttatagtcgttttttcggcgttatagagaagattttcgggagttcggcggtttaggcgtttcggttttgcgtttcgagtttttttcggtttttcgcgtttttttttttcggcgcgttcggcgcgaagtttgcgattcgtgagtcgagcgtagagcgtagagtcgagtggcgtacgttgggtagtggtttgggtaattttaaacgtagttagagtttttattcgagttcgttggttcgcgtattttcggattatgattgtcgagggatttagttcgtttgttcgttggtatagacgttttttcgggttttgggcggcggcgttgtttttgttcggtttgtcgcgtttttcggtgcgggcggatggtgagtgtgcgggaggcggcggggcggggggtggagcgtggggttcgggtagggagggcgtagttcgtcggggttgttttttttgatcggttcggtaagcggtaagcgtaagtttgagaggaacgaacgagtcgcggttttgcgatttagtattttttttttggtttattaagttttcgcgtgttcgtgcgtttaaacgttcgtttggtgtttggatttttttttagcgtcgagcgcgtaggtttcgtagtttcgtcgttggtttttttaaggtttttaagaaagttcgaatgaaattatttttaaggtgttttagaattttttttgttaaggggtgatttttcgtcgttttttagttttttaacgtttattaatgtgtttttgaggatatcgtcgatggttagaaaattttttcggatattttggtttggttcgggaagacgtgaaagatgagtgggaattagcgaggttaagagagagagaatggtttggttagagggaaaagtacgtgtaaaggttgtttttgagtgataggaaaaacgggataaatgataaagtaaagtatttggaggcgaggggacgttttgagatatgaggtagagaagtgggtaagggttagattatggtaggttttttgagaattgatttattttttgttcgtttgtttggttttttagtttgaatttagtttgtaatatttgttttaaaatgagtaggattggagttttgtatttatttttttttgaaaagttaatttagttgtgtttttatattagaataaaatttcgttgatttggtataggagtatttgaaggaagtaagtttaaagttagtagtttttatatttatgaggtagttttagtttaggacgaattagattgataaaagagaaaagtttttcgttaatttaggatgcgttgtatattttaaaatgtgatttttgtttagttaacgatattgagtgaaattagaagatatggggaaaaaaaaaaaaagtatggttgttaggaaaaggggaaagttaaggaaaaaatcgtttaggtcgtagagtttttagtgttttttgttttaagtgtaggtttgaaaagtttttcgtttttaattaaggatgaatgtcgtatttttttatatttttagagagagtgttagagataaaatatttttaattttgaaggttgttagtaattattgttaatttttttaattgatatgtattttatataaaatttgttattttaaaatatatagttaagtgggttttagtatatttattaggttgtgaaaattatggtttgtatgtatttaattttagaatatttttattattttttaaaagaattttatatttattagtagtttattgataattttttattgtagtgttttttgattgatattgagttatgaaaattaagttgattttaaagaatgtaagtagaataaattggagttaatattaatttttgaataagatatattgtgttaattttaattttttttaaataaatatttttgtaatttataaggttttagagttttattttattataattgtttaagtggaatgttatgtggataaggattaatattttgtgtttgtttagtttgatacgggttatagaaaattaaaggtagaaatgttattggttaaagagaaagtaaggataatattagagtatatgattttttgttattgtttgttagaaatgattttttttttttattttttttttttttttttttttatttttttagtggataattataggtatatttttttatagtaaatttaattttatgagttttaatttttatattagaattag

SEQ ID NO: 587 - DNA, 2823 bp, Artificial Sequence
  chemically treated genomic DNA (Homo sapiens)
tgagtacgttatagagtttaacgggttaaaagggggtgatagttttatattaattttttttcgttttattagtattttttcgtttatttaggtcgtttcgagtttttttggttgtttttgtattcgcgttttatttggtttttagatttatgcgatgttgggtaattcgggtcgggtgtgtttaggatcgtaaagcgggaagcgtaggttttgcggattgcgagtggttttcgcggtttgttgtttttttttataacgcgcgtttcgtttttcgcgtttcgggcgtttcgttttggtttatttatttgttgtcgagaattagatatcgcgtagtagaaagttagtcgttgggtcgcgaggttcggtcgtcggagcgggcggggttggggcgtcgtcgagatagattcgatttttatttttttttaaatgcgttgttgaaagtcgagaaggtttcggtcggggagttcgcgtcgttttttttttttttagtttttttcgtattttgagttttttagttttatttcgggaggggtcgcgaaattgtattcgtaagggttttatatatattttaaggagtaggttaggtaggtaatcggagttggattcggacggtgagggggcggttttcggggatttgatattttggattttttacggtttagggtttaggcgggggaagaggtggtttaggacgatttggggtttttattttgttggtttgtttagcgtattttaagttcgcgtgtattttattttttttttttgtagatttaatgttcgtttggtaattgttttattttttttcgttggagagatttttttcgtttcgttataggcgttttacgttgttcggagtcgtgcgtttcgggacgggtagttttgggtttttcgacgtttggttaggtttaggaaagattcgttgttttttttgttgtttttatttaggagattcggcgttttgcgtttcgttttttttaatggtgtcgcggtttgtttttttggtttgtttttttttagtttttattttatacggtttttttcgttagttttatgataattttattcgtgttgaagattttgggtaaagaagtaattatcggtttttttttttttttttattttttcggcggtaggattagggggaaaggtgttcgggatataagttttttacgtagatttattgatgcggtcgtggttttgttattggttttttttcgaatggtgaggtttttttgttaattttggttttatggtataattagtataattttagtgagaggaatttagagttttagtttttttttgttttagtttttttgtgatttcgatttcgagggatttattttatttttttaagttttagttttttatttgtaaaatgggtagaatgattcgtatttttggggatgaagaaaatgtatatgtgagtacgtgggtatttggcgattcggagatttttgtaaattgtaggtttagcgagatggttttagtacgttttgtattttcgttcgcgcgattgtcgtcgggtgttcgttttagtcgttgtgtttttggtgtttttttcgttagggttacgtgtcggggaagttaaagcgggagtttttcgattttggtttagtttttagttttcggttttttgttttagtatttagattttcgtgggttaataaagttattggaaatttaacgaatttttcgatatttttcgaaaatcgtatgcgtgtgtttttgtgcgttttttttttgatcgaggtagggttttgtagggttttgtttggacgggaggttggagtggttttttttcggttgcggggtcggaggatgtagagattcgaaagaaggagaaatatagagattgttaaatgaaaggagattttgttttcggaatcgatttagttttttaaaagaatgaggaaaatatggggtttttatatattttggaaagtcgtttaggcgtttagtgaaaaacgtaaaaggtacgtggatttttatttgtgtaaaaatataaatggggtagggggttaaatattaggttttttttgtacgaaaggttttagcgtagagggttggagatttttttttttattgtatgtttttcgggattgttcgaagttaatgtgtgttgtttattatatttttgtattgaatttttaattaaaaaaagaaattgtaggaattgttttttgtttgtttgtttgttttgagacggagtttcgttttgtagtttagattggagtgtagtggcgttatttaggtttattgtaattttcgttttttgggtttaagcgatttttttgttttagtttttcgagtagttgggattataggcgcgtgttattacgttcggttaattttttttttttttttttttttttttttttttttagtagaggcggggttttatcgtgttagttaggatggtttcgattttttgatttcgtgattcgtttatttcggttttttaaagtgttgggattataggcgtgagttatcgcgttcggttaataaattgattttttaaaaagtaatttgggtcgggcgtagtggtttacgtttgtaattttagttttttgggaggtcgaggcgggtggattatttgagattagaagttcgagattaattagcgtgattaatatggagaaagtttatttttattaaaaatataaaattagtcgggtgtggcggtattcgtttgtaatgttagttatttcggaggttgaggtaggagaatcgtttgaattcggaaagaggaggttgcggtgagtcgagatcgcgttattgtattttagtttgggtaataagaacgaaatttcgttttaataa

SEQ ID NO: 588 - DNA, 2823 bp, Artificial Sequence
  chemically treated genomic DNA (Homo sapiens)
ttattgagacggagtttcgtttttgttgtttaggttggagtgtaatggcgcgatttcggtttatcgtaatttttttttttcgggtttaagcgatttttttgttttagttttcggagtagttggtattataggcgagtgtcgttatattcggttaattttgtatttttagtagagatgggttttttttatgttagttacgttggttggtttcgaatttttgattttaggtgatttattcgtttcggttttttaaagagttgggattgtaggcgtgagttattgcgttcggtttaggttgttttttaaaaaattaatttattggtcgggcgcggtggtttacgtttgtgattttaatattttgggagatcgaggtgggcggattacgaggttaggagatcgagattattttgattaatacggtgaaatttcgtttttattaaaaaaaaaaaaaaaaagaaaaaaggaaaaaaaattagtcgggcgtggtggtacgcgtttgtaattttagttattcgggagattgaggtaggagaatcgtttgagtttaggaggcggaggttgtagtgagtttaaatagcgttattgtattttagtttgggttatagagcgagatttcgttttaaaataaataaataaataaaaaataatttttgtagtttttttttttaattgaaaatttaatgtaagaatatggtaagtaatatatattggtttcgaatagtttcgaaagatatataatgaaaagaaaaatttttaattttttgcgttgagatttttcgtgtagaaaaaatttgatgtttaattttttgttttatttatatttttatataaataggaatttacgtgttttttgcgttttttattgaacgtttaggcgattttttaggatatataaagattttatgttttttttatttttttaaagagttgggtcgatttcgaagatagaatttttttttatttgatagtttttgtgtttttttttttttcgaatttttgtatttttcgatttcgtagtcgggaaggaattattttagtttttcgtttaaatagaattttatagggttttatttcgattagaggaaaaacgtatagaagtatacgtatacggttttcgaaaaatgtcgggaagttcgttgggtttttagtgattttgttgatttacgagaatttagatgttagagtaaaggatcgagggttaagggttgggttaagatcgaaagattttcgttttggttttttcggtacgtggttttggcggaggaagtattagggatatagcggttggggcgggtattcggcggtagtcgcgcggacgagggtgtagggcgtgttgaggttatttcgttgggtttgtagtttgtagagattttcgggtcgttaagtatttacgtgtttatatgtgtattttttttatttttagaggtgcgagttattttgtttattttgtaaatgggaaattgaggtttagagaggtgaagtgaatttttcgagatcgagattatagagggattggagtaggggaggattggaattttgggttttttttattggggttatattagttatgttatggggttagggttagtaggagaattttattattcggagaggggttaatggtagaattacggtcgtattagtgggtttgcgtgaggggtttgtatttcgggtatttttttttttagttttgtcgtcggaggaatgggaagggaggggaagatcgatggttatttttttgtttaaggtttttagtacgagtgggattgttatggagttggcgaagggagtcgtgtggggtagggattaggagggagtaagttagagggataagtcgcgatattattaaaaaggacggagcgtaaggcgtcgagttttttaggtgggggtagtaaggaagatagcgggttttttttaaatttggttaagcgtcgaggaatttaaaattattcgtttcggggcgtacgatttcgggtagcgtgggacgtttgtggcgaggcggaagggatttttttagcgagagggaatggggtaattgttagacggatattggatttgtagaaggagggggtaggatatacgcgggtttaggatgcgttggataggttagtaaagtgaggattttaggtcgttttgagttattttttttttcgtttgagttttgagtcgtaagggatttagggtattaggttttcgggggtcgtttttttatcgttcgagtttagtttcggttatttgtttggtttgttttttaaaatatgtatgaggtttttgcgggtgtagtttcgcggtttttttcggagtggggttgggggatttagggtgcgaggggagttgaggggggaggaagcgacgcgagtttttcggtcggggttttttcgatttttagtagcgtatttaagaaaaggtggaaatcggatttgtttcggcggcgttttagtttcgttcgtttcgacggtcggatttcgcggtttagcggttagttttttgttgcgcggtgtttggttttcgatagtaggtgaatgggttagggcggggcgttcggagcgcggggggcggggcgcgcgttataaaggggagtagtaggtcgcgggggttattcgtagttcgtaaggtttgcgtttttcgttttgcggttttgggtatattcggttcgggttgtttagtatcgtatgggtttgaggattaggtagggcgcgggtgtagagatagttagggaggttcgaggcgatttagatgggcgggggaatgttagtaggacggggaggggttaatgtggagttattatttttttttggttcgttgggttttgtgacgtgttta

SEQ ID NO: 589 - DNA, 2344 bp, Artificial Sequence
  chemically treated genomic DNA (Homo sapiens)
taagaggagttaggatgaagggataggttttaaagattttgatgttaatatttttgaaagtttcggaggagaaatggtcgtttttggaaagaaaggattgaagagtatagagattatagttttttttatatataaattttatatacgagtttggtttgtgtttagtgatttttttatcgttatcgtgtagtttttttatcgggtttataggaattgcgagttaggttggaggcgagattgtagttagatattaattaggtgtttttagtttcgttgttttataggaagtcgtttttttgagagttaggttatagtagacgttgatcgtcggtttttttattggtttggggataagatttttgagagttgtttaagagtcgtttaagtttttttttagattttgaattttagcggaaaggttggcgttaagtaggttgaagattttataaggaagtttatttagtagtagaatgcggtttttttatttttagttttaagatttattttttatttttttattaattagcgattttatattttaattattttcgtttagatttttaaatattttatttttaaattttttacggaggcggatttagggtgtttttttttattaaatcgtttttgttgtagttttcggcgttcgggtgtagtgatttgggttgcgaatttgtattggtttcgtcgtataatttggggagaagcggggttgagggcgcggagttgtttagagaggggcgtcggggtcggggtcgtagtcgtagtttagggacgggataggacgttcggggtttcggttgtcggtttagttttattttgcggttaaacggatcgaggatcgaggtgcgtagggggcgtttaggttttagattttaaagacgttgcggcgaggttcgggtttcgttatagtcggtttcgattggtttcgattagtttttcgttttgttttaggacgtcgggtttcgtatatttattatttttcggttgtgcggtgtttcgggtttttttaattttcgtagttagggtaggttttagcgcgataaaagttattatagatgttttagggcgttttttagtgatagaatacggaatagaggttattagggtgaagaggttattagtttttggaacgttatatttttttttttgtttcgcgtttgattgataatttttaggaattcgtttacgattttgattgggtagttttttaggtttcgttttttgggtattgagtgatagaagaagcgattttatagtgttgagtgtagtcggatgaataggttttagattcggtttttggtagggcgggttttttttttgcgttgtgattcgattcgtttcgggaaacgtttgttttaaagcggaattttttatttgtacgtagtgggttttttttgttttttttttttgaataattgtgtgtaaggaattttagatttattgtttagtggagttattttttggttttagagtaggagggtagtcgaggttatataggttatattgtagtagcgggggatagggggtgggtgggtgggggggtggtgttgatgttttttagggattaggaatttgggatgaggttgtcgtttgtaaggttaagttttttttttattataagcgttggatgggttttttttgcgcgttacgtaaataaagattacggtattgtagttaaaaaaaaagtttaataaatattaggttagttacgatacgtgagagacggagttattatttaaattatttttatttaaggttttttggtaggggttttttaagggtagtttgggagaaagggtggaggtagttaggtttgttattgattggttggggtggggatgaaattattggggatggaatttgtttttttggtagtgcgtggtggtttatcgttgtaattttaatattttgggaggtttaggtgggaggatcgtttgaggttagtagtttaagattagtttggatatagagtgaaatttcgtttttatattataagggaggagattattttttatattgttttatgtttaatttttgtttttaaagaagaagtaaaaattaaaaggtagaaatgaaatttataggtagataattcggtttgtgttttgggttgggtagttaaaaattaatttttgatttaattgtgttatttatgattttagatattgtatggaaaagtattgtgaaaatttttgttttgttttgtttagttttggttatcggtgtatgtagtttttagttacgtatttattgtttgttttattaattacgatttttttacgcggatttttagttgtaagtttttaaaagggataagaattgtttattcggggagttcggt

SEQ ID NO: 590 - DNA, 2344 bp, Artificial Sequence
  chemically treated genomic DNA (Homo sapiens)
atcgagtttttcgagtgagtaatttttgttttttttaagggtttataattaggagttcgcgtgagagggtcgtgattgatggagtaaatagtgggtacgtgattgggggttgtatgtatcggtaattagaattgaatagaataggatagggatttttatagtgtttttttatataatgtttggaattatagataatatagttaggttagaggttgatttttaattatttagtttagggtataagtcgggttatttgtttgtggattttatttttgttttttagtttttattttttttttggaggtagaaattgggtataagataatatgaggggtggtttttttttttatagtatagagacggagttttattttatgtttaggttggttttgaattattggttttaagcgatttttttatttaggttttttaaagtattgggattatagcggtgagttattacgtattgttaagaggatagattttatttttagtgattttatttttattttaattagttagtagtaagtttagttatttttatttttttttttaaattgtttttgaaaaatttttattagaggattttggatgagaataatttgagtagtaatttcgttttttacgtatcgtagttggtttagtgtttattaaattttttttttaattgtaatatcgtggtttttatttgcgtagcgcgtagaaagaatttatttagcgtttatagtggaagaaaggtttgattttgtaggcgatagttttattttaaatttttggtttttggaggatattagtattatttttttatttatttattttttgtttttcgttgttatagtgtggtttgtgtggtttcggttgtttttttgttttgaggttaagggatggttttattggatagtgagtttgggattttttgtatataattgtttaggaggaagaagtaaaaagggtttattgcgtataggtaggaaatttcgttttaaggtaaacgtttttcgggacgggtcgggttataacgtagggaggaagttcgttttgttaggggtcgggtttggaatttgtttattcggttgtatttagtattgtgagatcgttttttttgttatttagtgtttaggaggcgggatttggagggttatttaattaaagtcgtgggcgggtttttgagaattgttaattaggcgcgaggtagagaggagggtgtgacgttttaggagttagtggtttttttattttggtgatttttgtttcgtattttgttattgagagacgttttgggatatttgtggtggtttttgtcgcgttgggatttattttgattacgggagttgggaggattcgggatatcgtatagtcgggaaatggtgagtgtgcggggttcggcgttttgaggtagggcgaagggttggtcggaattagtcggaatcggttgtggcgggattcgggtttcgtcgtagcgtttttggggtttgggatttgagcgttttttgcgtatttcggttttcggttcgtttggtcgtagggtggggttgggtcggtagtcgggatttcgggcgttttgtttcgtttttgagttgcgattgcggtttcggtttcggcgtttttttttgggtagtttcgcgtttttagtttcgtttttttttagattgtgcggcggaattagtataggttcgtagtttaagttattgtattcggacgtcgagggttgtagtagaaacggtttaataggagaggatattttagattcgttttcgtgagaggtttgaggatggggtgtttaggggtttggacgggggtggttgggatgtggggtcgttggttggtggagaagtgaggggtgaattttgggattggaggtgaagaaatcgtattttgttgttgagtgggtttttttgtggggtttttagtttgtttggcgttagttttttcgttggaatttaagatttgagaaagaatttagacgatttttgagtaatttttagagattttatttttaggttaatggggaagtcggcggttagcgtttgttgtgatttgatttttagggaggcggttttttgtgaagtagcggggttgagggtatttggttaatatttaattgtaatttcgtttttagtttggttcgtagtttttgtgagttcggtgaggaggttgtacggtgacggtgggagggttattaggtataaattagattcgtgtgtggggtttgtgtgtgggaggagttgtggtttttgtgttttttagttttttttttttaagggcgattatttttttttcgaggtttttaaagatattggtattagggtttttgagatttgtttttttattttaattttttttg

SEQ ID NO: 591 - DNA, 2246 bp, Artificial Sequence
  chemically treated genomic DNA (Homo sapiens)
cgcgcgcgcgtatatttatatatatatatatatagtcgttagttgcgtatattcgtagtttaagtcggatatacgtgtaaatcgcgtttttgtgcgtttatttttttcgagtttcggttgcgtaatagcgggagggggttggggggggttattgggtagtttattttaaaataaaagaaaaatcgtttttatattttttttattttgggagtaggattttttgagaaggggggcggggtgttgtgtgagtgaattaaattgaattaatgtaagtttttatttatttaaaagttttttcggatttggattttgggggtgggggcgtggattgtggaaaagggttggggtcgatatgggagttggggggatagtaagaatcgtttcgtttttttggaaaagtcgtttggtagtttttatttttgttttatggtcgcgggcggcgaggggaggggagtagatgttggagtttaatttttaaaaagtgtttttatataaattttggtattatagattttgggagggtgaggatgataaaataaacgatattaagataatagaattaagagtacgtgagggggtgagaagtgtttgagattttgtttgagttttatttggaaaaggatttttatttaaatttttgttttttttttttattttatttcgattaatttttggggttaaatacgattttattttttaaattgggtttatggtaagcgagagggtaaagggatcggggcgttttacgtgggagagggatttggatttgttagtttaggagtaggtgtggttaaattttcgtagatattcgggtgggtgattttaggaggcgtttttgataattatagtaatttggaagttatatttcgtttttcgcgtttttcggtttagggtaggatttggaaatgtttgttagattgggaaggacgtagttgttttgttagtcgtttgatttttaatcggcgaggataagaggagttgtggggttttttcgtggttcggggataaggttagattacggttttcgtggatattttttattttttaggttgtggttaattttgttaatttgatgatttggtttttagggttgggcgcgttacgcggttggttttttttttttttttagggtttttttggaggcggttagggcgggtcggggtttggtttcggttaggtttcgcgggcgagtttagttgtatttattttatttcgtttttaggtttggtttcggcggttttattcgggcgtatggcgaggtcgtgacgttttagcgtcgtttttttcggggtttttttttcggggggtatacgggggtttttgttttcgtttcgaaggttttgggtggggcgatggtattaataatttaatagcgtttagagttcgtgagcgagaatagaaagagattttttttagttttatattttaaaaaataataataataaaatgtgttttggtttgtagttttgtaaattgtgggttttacggtgggcggacgcgaggtcgagcggatggagatcgggggcggggcgcggatttgtattttttcgttttggtcgggtaggttgtattcggttgtttatttttaatattttatttttacgtggtttaaagtttagtagggttttttttttttgttattttttttatcgggaaaatttttttaggaaagtggtttaaaaaaaatatgtttatacgtatttttaataaatttttttaagatatttataaattggttatttttattcgttcggattttaaatttgaaagattaattcgcgttttttttttgagaattagcgatgtgaagtttagagagggtgagtattttgttttaggatatatagcgcgttagggataggtttggatttaaaatatcgcggcgtgtttgtagtttagcgtcgtcggcggttcgggattcgaaatttcgatttacgatttttatttttttggggttgattataaggaaggtagatttcgttagtggtaaggcgggacggggaggattttttaggaaaagggagttttttcgcgagcggcgtaagggttttcggagttttagttgtagtcgttatttcgcgtgcggtaaggggtcgtgtttggggagggggtattttttttttatttttagtaggaagtagttggcgtgggtcggcgcgtgttttacggattcgaggagtatttttttattggtttcgcgttgtttcgacggcgggaagagggacgcgcgggcgggcggacgtagg

SEQ ID NO: 592 - DNA, 2246 bp, Artificial Sequence
  chemically treated genomic DNA (Homo sapiens)
tttgcgttcgttcgttcgcgcgttttttttttcgtcgtcggggtagcgcggggttaatgaggaagtgtttttcgggttcgtggggtacgcgtcggtttacgttagttattttttgttgggagtggggagggggtgttttttttttaggtacggttttttatcgtacgcggggtggcggttgtagttgggatttcgagagtttttgcgtcgttcgcggaggggttttttttttttgaggggtttttttcgtttcgttttgttattggcggggtttgttttttttgtaattaattttaggaaggtgagggtcgtgggtcgggatttcgagtttcggatcgtcggcggcgttgggttgtaggtacgtcgcggtgttttgggtttagatttgtttttgacgcgttgtgtgttttagggtaaagtgtttattttttttgggttttatatcgttagtttttagaaagagagcgcgagttgattttttaaatttagagttcgggcgagtagggatggttagtttatgaatgttttaaagaagtttattaaaggtgcgtgtgggtatattttttttaagttatttttttggaaagattttttcggtgagagggatggtagaagagggaggttttattagattttggattacgtggaggtggggtgttgggggtgggtagtcgggtgtagtttgttcggttagggcgaggaggtgtaagttcgcgtttcgttttcggtttttattcgttcggtttcgcgttcgtttatcgtggagtttatagtttatagaattgtaagttagggtatattttattgttattattttttagggtatgggattggaagggatttttttttgttttcgtttacggattttgggcgttgttaaattgttggtgttatcgttttatttaagattttcgggacgaaaataaaaattttcgtgtgtttttcgaggaaaaggtttcgagggaggcggcgttgaggcgttacggtttcgttatgcgttcgggtgaagtcgtcggagttaggtttgggggcggagtggggtgggtgtagttggattcgttcgcgaagtttagtcggagttaggtttcgattcgttttggtcgtttttagagaaattttgagaagggagaggaggttagtcgcgtggcgcgtttagttttggaggttaggttattaaattgataaagttggttatagtttggggaatggggggtgtttacgggggtcgtggtttggttttgttttcgggttacggagaggttttataattttttttgttttcgtcggttggagattaaacggttgataaggtagttgcgttttttttagtttgataggtatttttaagttttattttgggtcgaggagcgcggggggcggggtgtgatttttaggttgttgtgattgttaggggcgttttttggagttatttattcgagtatttgcggagatttggttatatttatttttgggttggtaagtttaagttttttttttacgtggagcgtttcggtttttttattttttcgtttgttatagatttagtttaggaggtggggtcgtgtttgattttaggagttaatcggggtaaggtgaggggaggggataaagatttgagtgaaaatttttttttaagtgggatttaaataaggttttaaatattttttatttttttacgtgtttttgattttgttgttttagtgtcgtttattttgttatttttatttttttagagtttgtaatattaggatttatatggagatattttttggaagttgaattttaatatttattttttttttttcgtcgttcgcgattataaaataaaagtaaaaattattaagcgatttttttagggaaacgaagcgatttttattgtttttttaatttttatgtcgattttaatttttttttatagtttacgtttttatttttaaagtttaagttcgaaagagtttttgggtgggtggagatttgtattgatttaatttagtttatttatatagtatttcgtttttttttttagggggttttgtttttaggatggaggagatataaggacgattttttttttattttaaaataagttgtttagtggttttttttaattttttttcgttgttgcgtagtcggggttcgggggagatgagcgtataaaaacgcggtttgtacgtgtgttcggtttgggttgcgggtgtgcgtaattggcgattgtgtgtgtgtgtgtgtgagtgtgcgcgcgcgcg

SEQ ID NO: 593 - DNA, 2357 bp, Artificial Sequence
  chemically treated genomic DNA (Homo sapiens)
tttgtagttttcgggagcgggaacgtcggggataagagttgaagggacgaaggatattggagatggttagggggaaattcggcgtgatttttttttagggttgtgtgagggtttttaaatttttatttttgtttagggtcggtagcgaggttttattatagggataagttcggtagattttttttttttttaggtttttagtaaaatgttgggttttttgttagtggaaaacggaagaaaagtttggagcgtttttggagtcgttcgtttgggaagaaatgaattttgattttagtttcggttcgtgtatcggaggttttagggttgcgagggtcgtttgggtagagtttaggttaagaaggagttcggttgaggataggagttcggggtttgtgtgggagacgggatttttttttaggatgttcgggttggtttgttgggaggcggcggggttttttttttagggttttgtattcgggttttatatcgggtgaaatttttgggttggggtttagtacgcgagatcgttgttttacgcgggttatatagattattttttcgcgggtcgtagtttttggttatcggtttttttttcggtgttggggtcgtttggagtcgttgggagtcgagtggttttcggggaggcggcgtcgcggtgtttagggtgcggggttcgtttttgtgcgtttgagggcgggggtcgtataggagtttttttcggggttggttttcgaggcgttgtattttttattagttttttgtgatcgaaatcgaaatttttatttgcgtaatttttttagatgggtttgaggttggggtgtggtcgggattcgggcggggaggggtaggggtggagtgaaggcggggtttgggggggtgcgcgtggacggggagagtggaatcgcgggtgtggatttttaagtatagacgttagagaacgtttgtcgttttggttcgttggtttaggggtatgattttcgttttgggtgcgagaggtttcgggtttaaatttcggacgagttcgtttttttttttttttttgaatattattattttttcgcggtgaagattgaggagttttacggagtttcggtcgtagggaatttggttttttcgtggtagttgtaggcgtcggggtcgattcgatttttcgttttcgttcggtttgcggtttttcgttttgttcggttataggaaggattcgtttgcgttttttgattggagttttttatttgggagttttgagtgcgtttaaggtttggcgttgaggtagtggattttagattcgggattcgaaaggagggtaaatatttttatcgtcgcgtttgtttttgcggacgtggttttagatttcgggtggttatggaatttggtttgggcgtgtagtttttttttgagtgggtcggttttaagtttaaattttcgacgagtttagggtttcgaatttttttttttttttttttcgttttttttttttttttttttttttttttttttttttttttttttttttttttttttttttttttttttttttttttttttttttttttttttttttttttttttttttttttttttttttttttttttttttttttttttttttttttttttattttttttttttttttttttttgttttttgttttttttgatagtgtttttttttgttgtttaggttggagtgttggagtgtagtggtgcgatttcggtttattgtaattttaattttttaaatttaagggatttttttatttttattttttaagtagttgggattataggtgtttattattacgttaggttaagtgtgtgtgtgtgtgtgtgtgtgtgtgtgtgtgtgtgtgtgtgtttgtgtgtgtaaaatcgaggtttcgttgtgttttggaggttggtttttaatttgtatttaagtaatttttttatttcggtttttttttataaagtgttgtaattataggttagaattattatgtttagttggttttttttttttttaggttttgaggtcgtagcggcgcgttttttcggtatatggcggggaagaggtgcggtttcgggagtttgcgacgtttttggggagtttaagttcggtttttagttttttgttcgaggacggaggaggatttggggggttttttttagttggtggttttagttttttaggggcggcggagatagtaggaagttttaaaattcgagttgggttttttgtttggagtcgtagggtgtggtaatgttgaagttcgtcgtgtttttgttttttatgggaattagaattcggtttaggataagtatcgggaaagggggatagtttgtgatcgaggaaattaggattgatttagaatagcgta

SEQ ID NO: 594 - DNA, 2357 bp, Artificial Sequence
  chemically treated genomic DNA (Homo sapiens)
tgcgttgttttggattagttttagttttttcggttataaattgtttttttttttcgatgtttgttttggatcggattttaatttttatagggagtaggggtacggcgaattttaatattgttatattttgcgattttaagtaggaaatttagttcgggttttggggttttttgttgttttcgtcgtttttggagaattgagattattagttaggggaagttttttaggttttttttcgttttcgggtaaagggttaggagtcgggtttggattttttagaggcgtcgtaggttttcggaatcgtatttttttttcgttatgtatcggagggacgcgtcgttgcgattttaggatttggaaggaaaaggaattagttgagtatggtggttttggtttgtaattgtagtattttgtgaggggaggtcgaggtaggaagattgtttgagtgtaagttggagattagtttttagaatatagcgagatttcggttttatatatataaatatatatatatatatatatatatatatatatatatatatatatttagtttggcgtggtggtgagtatttgtagttttagttatttgggaggtggaggtgggaggattttttgagtttgggaggttgaggttgtagtgagtcgagatcgtattattgtattttagtattttagtttgggtaatagaaggagatattgttaaaaaaaataaaaaataaaaaaagaagaaaaaggaaaataaaagagaaaaagaaagaaagaaagaaagagagagagagagagagaaagaaagaaagaaagaaagaaagaaagaaagaaagaaagaaagaaagagagaaaaagaaagaaagagagaaaaagaaagaaagaaagaaaagaaaagaaagagaaacgaaggaaaaaaggaaggaagttcgaaattttgggttcgtcggaaatttaaatttagaatcgatttatttaaaggaaaattatacgtttagattaagttttatggttattcgggatttagggttacgttcgtagaggtagacgcggcggtggaggtgtttgtttttttttcgggtttcggatttggggtttattgttttagcgttaggttttaggcgtatttagaatttttaggtggaaggttttagttaggaggcgtaggcgagttttttttgtagtcgggtaaggcgaggggtcgtaagtcggacggaagcgggaagtcggatcggtttcggcgtttgtagttgttacggagagattaagttttttgcggtcgagatttcgtgaagttttttaatttttatcgcgagaaaatgatggtgtttagaaaaaaaaaaaaaagcgggttcgttcgggatttgaattcgggatttttcgtatttaaagcgagaattatatttttagattaacgagttaggacgataaacgttttttgacgtttgtatttggaggtttatattcgcggttttatttttttcgtttacgcgtatttttttagatttcgtttttattttatttttattttttttcgttcgggtttcggttatattttaattttaagtttatttgggagggttgcgtaggtggaggtttcggtttcgattataggaagttggtaggaggtgtagcgtttcggggattagtttcgggaagagtttttgtacgattttcgtttttaggcgtatagaggcggatttcgtattttgggtatcgcggcgtcgttttttcgagggttattcggtttttagcggttttaggcggttttagtatcgagaggagggtcggtgattaggggttgcggttcgcggggaggtggtttgtgtggttcgcgtgaggtagcggtttcgcgtgttgagttttagtttagaaattttattcgatgtgaaattcgagtgtaggattttgaggaggagatttcgtcgttttttagtaggttagttcgggtattttaggaagggatttcgttttttatatagatttcgggtttttgtttttagtcgagtttttttttggtttgagttttgtttaggcgattttcgtagttttgggattttcgatatacgggtcggagttggggttagagtttatttttttttaaacgggcggttttagaaacgttttaaatttttttttcgttttttattggtaagggatttagtattttattgggagtttaaggaggagaaaggtttatcgggtttgtttttgtggtgaggtttcgttgtcggttttaaatagggatgagggtttgaaaatttttatatagttttaagagagagttacgtcgagtttttttttggttatttttagtgtttttcgtttttttagtttttgttttcgacgttttcgttttcgggagttgtagg

SEQ ID NO: 595 - DNA, 2290 bp, Artificial Sequence
  chemically treated genomic DNA (Homo sapiens)
taataaggtttttaaagtttttatatttaatgtgtggtttcggaattagaagtattgtaattatttggaagtttgtttgttataaatatagatatttagattttgttttagatatattgaaatagaatttgtattttaataaaagatttagaggattgtttttatattgtgtgtgtgtgtgtgtgtgtgtatttaaaaagatataggtgttataattttttattgtttggttaattttaaaatttaatattgtataatggatattttttatgttaatatagatttacgttattatttattataaataaatagtaagttattgtatttatcgttattgattggtatttatattaatttaatattttgttattgtaagaaatattttgatttagaaacgttgacgtaaagatttttgagtaggatatttaggagatattgattttgttatatttttttttttgttatattttgttgttttaatagattacgtgggtatattatttttattgattttttttttttttgtaaatgtaaattttaattgaattataaggttagtttatagtgtatttgtgggtagatttttttaaaatgtatggtattttaaattttgttttacgagaggtttaggaaaatgtttattaagtttttgtgattttaatatcgtgttaggttatggtaaagtgaggtgtttttgacgtttgggttgttatagcgtgttttttagttattttggtaatatttgtgatttgagggttattttattcgcgttagtaattcgcgcgggttgggaggcgttaatgagagtagggtttgaaattagcgtttggcgtttgatggttgtttagcgacggtcgtcgacgttaatttttggtcggacggatttatatttgttttttggttatcgagagggtagttatgaatatttaaaagggtttttttattataaacgtttatagaggttttttcgttatgagtatttaaaggggttttttcgtttttcgggatatggatagttcgggtagagatatgtagttgcgggtgatttcggttgaggtgaagtttttggatacgatggtcgggagggtgtatcgtttttcgattattgtgtataatatttgtcgttggaattagaaaattcgatttaaggagttcgttaagttataggtgatatattaaggggtgttgggagcgggattttgtgagagcgtttttttatattgcgtttttttttgttttagggagtagttatttggtttttgtcgggatggagggaggattgggtttttcgggaaatagtgataggtttttgtgtgtgtgttttttttgtttttttttgttttttgttttgtttaggattaggagatggggagggtagggtggagaaaagttgatttagagtttttttatttttttaatttgggtttagaaatttgttaataattttaaaatttgtgtaatttggttttatgattttgttgttgttttaagaattatgagaataaaattttttattaattgttttttgaattataaagtgtttgataattttaggaattgtaggattagtggaaaggtttattattttatattttaataaatatttgttaagtatttattatataacgggtaatagatatgaggaatacggaatggatatagttttgtttttatagaatttagaaattaatgagggggttttagtatagatttaattattaagaaagttaatgttttgagagggtgtttttattttttaatttaaagtgggtagaattttttttgtattttattgtgttattttatattatgtgtgtgaatggatggttattagtttagtatgattatatttttttaggtaaatttttgatataggaaatgcgataagaatttttgaaatgtaagtaataaataattgaaaattttaagagatatttttaataaaaagtagtgttgaatatagttggattatatgtgtagaaaaaaaagatgttcgtaattttagattaaatttatatatatttttttgtatatatgtagaaaaatttatgttaatgattagaagagtaatgagaaaaaggatttttatgttttaatttttgttttgttaaaaaaatcgatgtattatttatttattaaagtgtatagattttaaaagtaaagtttgatgaatttataaaaaaataaatatgtgtgtgtgtagatagatagttagatagataatttttattagttattatttggattaaataatagaatatgtttattattttagaagatttttagtgtt

SEQ ID NO: 596 - DNA, 2290 bp, Artificial Sequence
  chemically treated genomic DNA (Homo sapiens)
agtattggggattttttggggtagtgaatatattttattatttgatttaggtggtagttaatggagattatttatttagttatttatttatatatatatatatttatttttttgtaaatttattaaattttatttttgagatttgtgtattttagtaagtaaataatatatcgatttttttaatagagtaaaaattagaatatggaagtttttttttttattgtttttttaattattaatataggtttttttatatatatataaagaaatatatgtaaatttaatttaaaattacggatattttttttttttgtatatatagtttagttgtatttaatattattttttattaggaatattttttgaagtttttagttatttattgtttatattttaaaaatttttatcgtattttttatattaaaaatttgtttgagaaaatgtgattatattgaattaataattatttatttatatatatgatgtaaaataatatagtgagatatagaggaaattttgtttattttaaattagaagatagaaatatttttttagaatattaatttttttgatggttagatttgtattaaaatttttttattagtttttaagttttatgagggtagggttgtgtttatttcgtattttttatgtttattattcgttatatagtaggtgtttaataaatgtttgttaaaatatgaaataatgaatttttttattaattttatagtttttggagttattaggtattttatgatttaaagggtagttaatagagaattttgtttttataatttttaaggtaatagtaaaattataaaattaagttgtatagattttgggattgttaataagtttttaaatttaggttgaagaaatggggaggttttaggttagtttttttttattttgttttttttattttttaattttaaataaaatagaaaataaagagaaataaaaagagtatatatatagaaatttgttattgtttttcgggaagtttaattttttttttatttcggtaggagttagatgattattttttggggtaaagagagacgtagtgtgaggaggcgtttttataaggtttcgtttttagtattttttagtgtgttatttgtggtttgacgggttttttaaatcggattttttggttttagcggtaaatattatgtatagtaatcgggaggcggtatattttttcggttatcgtgtttaggaattttattttagtcgggattattcgtagttgtatgtttttattcgagttatttatatttcgggggacgagggaatttttttggatgtttatggcgagggaatttttgtggacgtttatggtgagggaatttttttgggtgtttatggttgttttttcggtagttagaaaatagatgtggattcgttcggttaaggattagcgtcgacgatcgtcgttaggtaattattagacgttaagcgttagttttaagttttgtttttattggcgttttttaattcgcgcgagttgttaacgcgaatagaataatttttaggttataggtgttattagagtaattgaaaaatacgttgtggtagtttaaacgttagaggtattttattttgttatggtttggtacggtattaaaattatagaggtttagtgggtatttttttggatttttcgtaagataaagtttaaagtattatgtattttaaagaaatttgtttatagatgtattgtaaattggttttataatttaattaaaatttatatttataaagaaaaaaaagattagtgaaagtgatgtgtttacgtggtttattaaggtagtaagatataatagaaagggagatataataaagttagtgttttttagatgttttgtttagaggtttttacgttagcgtttttgaattagaatgttttttataatagtaaaatattggattaatatgaatattaattagtagcgatggatataataatttattgtttatttatgatgaataataacgtagatttgtgttgatataagagatatttattatatagtattaaattttaaaattgattaaataataagaaattgtgatatttgtatttttttaaatgtatatatatatatatatatataatgtaaaagtaattttttgggttttttgttaaaatgtagattttgttttagtatgtttgaagtaaggtttaagtatttgtatttatgataagtaagtttttaggtgattataatgtttttggtttcggggttatatattgaatatagaggttttaggaattttgtta

SEQ ID NO: 597 - DNA, 2375 bp, Artificial Sequence
  chemically treated genomic DNA (Homo sapiens)
agttttcgcggttgttttttaggagagagggagggaggaaaagggggaaaaaagtgtttcgcgtcgaaggcgaggttcgtatttttcgttttcgcggttggcgtaggattttattcgagcggagcgtttacggggagcgggtcgcggggcggcggcggcgaggaggaggcgagaaggagttggaggaggaggaggaggaggcgagggcgagttagtttagcggggtttcggtcgtttcgcgggttaaagtcgagttttttcgttcgtgggcgagcgcgttagtcgttttttttagaatagtcgtcgttataaagaagaacggggggtgtcgaggtttttatgattttttaaagtggtgcggtttttgttgagtgcgttgttcgggtcgtgattcgcgtttttgtgcgttttcgcgcgttttcgagcgtttttgtgcgtttcggttcgcgtttcgtcggtatggacgtttatattcgttggaaagcgcgtagcgcgtttcgttcgggcgtttcgttgttgttttcgttgttgttgttgttgttgtgggcgtcgttttcgagtcgcgtaggtaagggcgtttcggggcgcggggttgcgggatggggcgcgcgtagttcgggcgtcgttgttattttcgggcgttttcgttcgtagaattttttttttttggtttgtggaatgtacgggttaagattacgaatgttatttgttgggggttttttcgagatgacgatacgtagatataatgttcgcgggcgcgtcgtcgttttttttttagacgggcgggtcgggtggggttgtcgcgcgagtcgaggaaggatcgagggttggattagtaggaggggttgtttacgaggcgggtaaatttttgttttaaaaattttttttttttgttttatattataggcgtttagtttgggtttttatagttttatagtagaattttttttgttttaaatcgggtagggtcgttttttagagttatagttttttaaatttcgggatttttggggatggggggaattttagaagtttgggtttttagtattgaattttttttaggtattgttattttaggttgagttggcgttttgttttttttagggatagcgttttttgtagttttggttatttaagtgttcgggggtattggggatttttgtagggtggtagatagttttgtttttaattttatttttaaattttttgatttttggaaggtagttttttttggattcgttgttgagagatgggatgcgtggagtaaagttagagatgggtttgtaggcggggttgtgagtggttgggatgatatgtagatgtgggattttttttgttaagggttagtttttagaaggaggtttgtttttcggggagggcgttttaaggcggggattgtttgcgtttttgtttgggttttcgagggtttaattttttttggcgtagttttttgacgggggagtttttttaggtatcgtttttggtagttagtggcggggtgggtttttatagattttcgaatattagagtttttagttttggaaggtttttcgaatttttattgataggcggggagatggaggtttagagttgtgtgttgttaggttaggagaagtggcgggtagagcgatgggacggtgggtttagcgaacgtttggattagttcgtcgtttgttagtaagaatgtttttttttgttttacgattggaagataagtgggaagaattattgttcgtgtttcgtttgttaattaaaatattttttttttttttttttggtacgattagtgtttgttgggttaattggatgagttggagtttgggtgtgggggttgttttggggttttgggggaggagttaggagtttggtttggtttttaggatttgggattttatttttgggtcgttattaatttttttttgattttgggttaattgggtttgtgtttttttaggggttagttgaaggtgggggataatagaggtttttagaaaagtggagaggagaaggaaggtgtggttagggattgtgttattgtcgggggattaggttttgttttagcgtttttggggatttttttttagaaatttaggagggagttttttaggggaatcgttattttagatagttggggtagggtattgtttggggattatgtatcggattgggtttggggttttatttttttttttgtttatttttttatttttatattgtttttttttttttttggttgttttcgttaatcgaagtgcggttcgttggaagtgggagtgaggatggtttagagtagtaggttatggagttggatattttgtttttgttagaatagatttttagaagtatgtggagagattattttttttagtgagttt

SEQ ID NO: 598 - DNA, 2375 bp, Artificial Sequence
  chemically treated genomic DNA (Homo sapiens)
aaatttattaagaaaagtggtttttttatatgtttttaaaagtttgttttgataaaagtaaaatgtttaattttatagtttgttgttttgggttatttttatttttatttttaacgagtcgtatttcgattagcgagggtaattagagagggaaaaagatagtgtggaggtggggagatgggtagggagggaaatggaattttaagtttagttcggtgtatggtttttaggtagtgttttgttttagttgtttagggtgacgatttttttgaaggatttttttttgagtttttggggaaaagtttttagaggcgttgagatagggtttagtttttcggtaatggtatagtttttgattatatttttttttttttttttatttttttggggatttttgttgttttttatttttagttaatttttggagaaatataagtttagttagtttagggttaggagagagttggtggcggtttagggatgagattttaggttttgggagttaggttaggtttttggttttttttttagagttttagggtagtttttatatttagattttagtttatttagttagtttaataagtattgatcgtgttagggaaaaaggaaaagagtgttttaattgataagcggaatacggataatgattttttttatttgttttttaatcgtgaagtagagagaagtatttttgttggtaggcggcgggttggtttagacgttcgttgagtttatcgttttatcgttttgttcgttattttttttgatttggtagtatatagttttgagtttttattttttcgtttgttaataaggattcgggggattttttagggttgggggttttgatgttcgagagtttgtgaaaatttatttcgttattaattattaagagcgatgtttagaaaaattttttcgttaggaagttgcgttagggagagttgaattttcgagaatttaggtagggacgtagatagttttcgttttgaagcgtttttttcgggaagtaagtttttttttaagggttgatttttggtagaaggaattttatatttgtatattattttaattatttatagtttcgtttgtaagtttatttttggttttgttttacgtattttattttttagtagcgaatttaggaaaagttgttttttagggattaagaagtttgggggtgggattaggagtagggttgtttattattttgtaggggtttttagtgttttcgaatatttaggtgattaaggttgtaggaaacgttgtttttggggaaagtagggcgttagtttagtttagagtgatagtgtttgggggaagtttagtgttgggggtttaggtttttgggattttttttatttttaggagtttcgggatttgaagggttgtaattttagggggcggttttgttcggtttggagtagaggaagttttgttgtagggttgtgagggtttaagttgggcgtttgtgatgtgggatagagaaggaaggtttttgggataaaagtttgttcgtttcgtggataattttttttgttgatttagttttcggttttttttcggttcgcgcgatagttttattcgattcgttcgtttggggagggggcggcggcgcgttcgcgggtattgtgtttgcgtgtcgttatttcgggggggtttttagtaaatggtattcgtggttttggttcgtgtattttataggttaaggaagaaaagttttgcgggcgaaggcgttcggggatgatagcggcgttcgggttgcgcgcgttttatttcgtagtttcgcgtttcggggcgtttttatttgcgcggttcggaggcggcgtttatagtagtagtagtagtagcgggggtagtagcggggcgttcgggcggagcgcgttgcgcgttttttagcgggtatggacgtttatgtcggcggggcgcgggtcggggcgtataggggcgttcggaggcgcgcggggacgtataggggcgcgggttacggttcgggtagcgtatttagtagggatcgtattattttaggaggttatggggatttcggtatttttcgtttttttttgtggcggcggttgttttggaaggggcggttggcgcgttcgtttacgggcgggagggttcgattttggttcgcggggcggtcgggatttcgttgggttagttcgttttcgttttttttttttttttttttaattttttttcgtttttttttcgtcgtcgtcgtttcgcgattcgtttttcgtgggcgtttcgttcgagtgaggttttgcgttagtcgcggggacggagagtgcggatttcgttttcggcgcggagtattttttttttttttttttttttttttttttttttggaaggtagtcgcggaggtt

SEQ ID NO: 599 - DNA, 2227 bp, Artificial Sequence
  chemically treated genomic DNA (Homo sapiens)
tcgtttttcgtcgtggtttcgttttttgtcgtggttgggatttcgcgggaagagttgcgggtacggcggtggttcggtttttcggttgcgcgcggagcgggagggttttttttatataagcgtttttttgtcgagaggttggagttgcggtatcgtaggtttgagttattttttttttgttgttttttttttttttttagggttttcgtgtttgttcgtttttcgacgttgtttaggttagaaagttcggagcgcgttttcgttgaggagcggtcggggagcggggatacggagtagtcggagtaggcgggtttttgacgggggcggttttgggggttgcgcggcgttgtttggtgggcgcgaggtttggcggggtttgggagttcggggggcgaggaggcggtgtagtgggattcgggcgcgggcgtttaagggcggtgtagcgggtgtcggagttttcgaggtgagggggtaatgtattagggattttgggggttttttcggtttggggtaggggtgggtggcggtatacggggttttaggtttttgacgtcgagggagatttattagggttttgagttttttggaggtggtgtagcggggtttcgggataaggggtttttttattcgggtttcgagttttttggggtagagaatgtagtttagtaaggtttatatcggtgtaaattttgtttttggaggtagattatcggggttttgggggttttttgagcgggcgtgggcgttcgtttcgtattgttgggatgaagaagtagtgtgttcgggttttggggagaggggtttgtttatcggtgttttcgggtgagagagcgatgtattcgtttcgttggggtcggggtcgttttggggggttgttgggggttgagggtgtgtagcggcgattagcgtttggtcggggtttttgttttgttcggagcggggcggtaatttggtatggtttttagttttttgggggcgacggggcgagttagttggttttcgggtagtttttcggggtgggcgcggtttcgtaggcgttgggttcgttgagggcgggagagggttttggtgttatcgcgtaggttgggtagtattttgaaacgtttttgtttaggtttttttttttttggatgagatttatttaatgtttagttggaggattgatcggtgttgttgtttagttgaagaagtagtgcgtttgttttgtagtttttttttttttgtttcgggatttttgtgggggcgcgttggtttcgttggagtttcgggagttagagtggtagtattttaggtgggcgtttggtttgtaggttttttaggaggtcggtgttcgtaggttgagcgtggatatagtttttgagtaattggaatttgttgagggtggggaagattgattttggtttgtttttttaggtggtggtttgttttgtttattttgtatgattagatttgttttgaagttttgtttgagtgaatgttaggtagagtcggatagtgtagggaagcgtgttttgtttggtttttttttgttttttgaaaagtatttgtagagagggataacgttaaatttagtttttagaaaataatggaatttgaaattttaaagttagaattttgtaaaaacgttttttgtgatttgtaaggatggttaatcgagtttttttagagaattttgtttaatagttttattgtattgtaaaagtgtatttagttttggatattatagaggttttggtaattagcgtaggcgtaggtgggatttaaataaaatgatttgtatgtatgtgtattggttaaaaaaaaaaatagcgtataggtgagaaagtttatgtgtttgtttgatattttttttggttagttattttattatagaggtttgtatatgaaagttaatgtggtaggtagtgaagttcgtatttagagttgttttgtaaatatgtaatttggggttaatagataaatttgagtatattaaagtaaataattttgtttgttttagttttttttttcgtgttagtttttttttttttttgttttttggtttgttttttttgaaatagggatttatttcgttttttaggttaggttgtagtatcgttattatggtttattgtagtttcgatttttaaagtttaagtagtttttttagtttagttttttatttttatttttagtagaggagttggaattatatgtatgtgttattacgttttattaattttattta

SEQ ID NO: 600 - DNA, 2227 bp, Artificial Sequence
  chemically treated genomic DNA (Homo sapiens)
taaataaaattagtgaggcgtggtggtatatgtatgtagttttagtttttttattgggggtggggatgggaagttgaattgggagggttgtttgagttttggaggtcgaggttgtagtgagttatggtagcgatgttataatttagtttggaaggcggaataagtttttgttttaaaagaaataaattaaaaaataagaaaaaaaaaaaattgatacgaagaaaaagattaaggtaggtaaaattatttgttttggtatatttaaatttgtttgttaattttagattatatatttatagaatagttttgagtacggattttattgtttgttatattaatttttatatataggtttttgtgatagagtaattaattaaaagaaatgttaggtaaatatataggtttttttatttatacgttgtttttttttttaattaatatatatatatataagttattttatttaaattttatttacgtttacgttagttattaaaatttttgtaatatttaaggttaaatatatttttataatataatgaaattgttaagtagaattttttaaaaaagttcgattaattatttttataggttatagaaaacgtttttgtagagttttagttttgggattttaaattttattgttttttggaggttgaatttgacgttatttttttttataaatgttttttaaaggatagaaagaagttagatagaatacgtttttttgtattattcgattttgtttaatatttatttaggtaagattttagaatagatttaattatgtaggatgagtaaagtagattattatttaggaaagtaagttaaaattagttttttttatttttaatagattttagttgtttaggagttgtatttacgtttaatttgcggatatcggttttttaaagaatttgtagattaaacgtttatttaaggtgttgttattttagttttcggagttttagcgagattagcgcgtttttatagggatttcggggtagagaaaagaaaattgtagaataaacgtattgtttttttaattaggtaataatatcgattaattttttaattaagtattgagtaaattttatttagagagaaggagatttgaataaaaacgttttaggatgttgtttagtttgcgcggtagtattaaagttttttttcgtttttagcggatttagcgtttgcggagtcgcgtttatttcgagagattgttcgggggttagttaattcgtttcgtcgtttttaaaagattggagattatgttaagttatcgtttcgtttcgggtaaagtagaaatttcggttagacgttggtcgtcgttatatatttttagtttttaataattttttaaggcggtttcggttttagcggaacggatatatcgtttttttattcggagatatcgatgaatagatttttttttttagaattcggatatattgtttttttattttagtaatgcgaaacggacgtttacgttcgtttaaagaatttttaagatttcgatgatttgtttttagagataaggtttatatcggtgtaaattttgttaaattgtattttttgttttaaagagttcgggattcgggtaaaaagattttttgtttcggaatttcgttatattatttttaagaagtttaagattttgataaatttttttcgacgttaaagatttaggatttcgtgtgtcgttatttatttttattttaagtcggaagagtttttaggatttttaatatattgtttttttatttcgggagtttcggtattcgttatatcgtttttgggcgttcgcgttcggattttattgtatcgttttttcgtttttcggatttttaaatttcgttaagtttcgcgtttattaggtagcgtcgcgtagtttttagagtcgttttcgttaggagttcgtttgtttcggttgtttcgtgttttcgtttttcgatcgttttttagcggagacgcgtttcgggttttttaatttgagtagcgtcggagggcgagtagatacgggagttttgaggaagagaaggagatagtagagaaggggtggtttaggtttgcggtgtcgtagttttagtttttcggtaaggaagcgtttgtgtgaggagagttttttcgtttcgcgcgtagtcgggagatcgagttatcgtcgtgttcgtagtttttttcgcgagattttagttacggtaaggggcggggttacggcggggggcgg

SEQ ID NO: 601 - DNA, 2299 bp, Artificial Sequence
  chemically treated genomic DNA (Homo sapiens)
gcgagtttcggtcgtgggttaagtttaaagagcgtgtttcggttgtttttttaggttaattttatttgttttttattttagtaaattttttatttattttattttattttttaggttttttttgttgcgttcggttgtattgcgatttgggaagaagggagaagtgttattttttagcgcgcgggatttgcggggattttcgttttttcgttggttgataaagaattaatattcgtttcgtcgcgttttcggggttaaagaacgaaaattgttttttttttttttggcggatacggagcgcgttcgcggcgggtcgattagttcgggagcgtagttttcgcgaaggggcggcggggagcggcggggttcgggcgcgcggagagcgtttaattaatagcgtatttggacgcgttcggttgcggtttcgatttcgttttcgatcgcgttcgcggggttttagttttcgtatattattttttatagcgtttcgtttttacgtacgttttagttgtttttattcgggaaatggcgagaggttgttcgaagtttttgtcgtttacgaggcggaagttttacggtttcgggttttggaggtttatttgttgggtggttatggcgcggttgtggcgggcgacgattcgcggggatagacgggtaggacgcgcggaatagtttgtagggtattttcggcggttgtcggagaaagagcggcgcggcgcgggttcggggagtttggggttggcgggggtagggtaatcgcgagggttagggcgggggcggtttcgtttaggtcgcgtagtcgttcgtcgtttcgttcgttttttcgttcgtagtcgtttttcgttttgcgcgtcggtttgggggttttggttcggagtttcgtcgagagagcgcgagttagatgcggggtcggggtttttagtagttttgttcgggattttatatcgttttttttttttttgtacgtacggtcgtatcgcggttttcgggttcggggcgggtgttaggtgagagggaagtaggttttgatagcgagataaattcgcgtttcgtgttttgtaaaacgagaaatttgaagtgttgtgttaagttagttttttgaggtcggtttcgattttttatttgttttttgtaatcggtaatgatgtttaaaaggtgttttcgaacgattttatttgatgttgaggtaatcgggacgtttagttttattttatagatgaagtaattgagtttgtttagtaggtgagaagatttgttcgacgttatattattcgttagtatttggattattgttcgggtttagtgttgtagaattttattttggaatttttataatgttaatgagattattatttaggttataattgaattttaaggtttttttagaaattttttttttaggttggagtttatggtaggttttgattttaatagtttaaattttaagtttggggcgggttaagggttaagttaatgtaaaagaagagttgagttcgggatttggatttttagttttttattagttttttagttaggttttttttgacgttttttcggtggagtgtattttttacgtcggattagattattttttatgttgtttatggcgtttttattttattattagtgaaaatttagatttttataatgtttataaggttatttttagaatggttttaattttttttttgattttaattttttttgttttttttttatttgttttttagtttgttaggttgtgttttttgtttttaatttagggttttgttttagggttttgtttgtaatgttgtttttttagatatttttattattttttgttattttttaggggtcggatacgtggtttacgtttggaatttcggtattttgggaggttgagttaggaggattagttgagtttaggaattttagattagttttagtaatacggtaagattttgtttttataaaaaaatttaaaaaaataaaaattaattaggtttggtggggtatatttgttttagtttttagggagattgaggtgggaggatggtttgagtcggagaggttaaggttgtagtgagttgtggtcgtgtaattgtattttagtttgggtgatagagtgagattttattttaaaaattaaaaaataaaaaaaatgtaaatgttattttttgaggttatttttgagtattatttaagatattttttttagaatgttttattatttttttttgttttattttttttttttgtatgtattattatttggtattttttatattttgtatatttatttgttttatttttattt

SEQ ID NO: 602 - DNA, 2299 bp, Artificial Sequence
  chemically treated genomic DNA (Homo sapiens)
gagtgggggtggaataaataaatatataaaatatagagaatgttagatggtgatatatataaaagaaaaaaataaggtaggggaaggtaatagagtattttagagaggatattttaaatgatgtttagagatgattttagaaaatgatatttgtattttttttattttttagtttttgagatagggttttattttgttatttaggttggagtatagttgtacgattatagtttattgtagttttgattttttcggtttaagttatttttttattttagtttttttagaagttgggataggtgtgttttattaaatttggttaatttttatttttttaaatttttttgtagagatagggttttgtcgtgttgttggggttggtttagaatttttgggtttaattgatttttttgatttagttttttaaagtgtcgggattttaggcgtgagttacgtgttcggtttttagaaaatgatagagagtggtggggatgtttgggagaatagtattgtagatagggttttgaggtaaggttttgagttaggagtaaggagtatagtttggtagattggggggtaggtgaggaaagggtaggaggagttggggttagagagggagttggggttattttaggggtggttttgtaggtattgtaaggatttgggtttttattggtggtgaggtggggacgttatggatagtatgagaaatggtttggttcggcgtggagaatgtattttatcgggagggcgttagggggagtttggttaggaagttggtgggaggttgggaatttaggtttcggatttagttttttttttgtattgatttggtttttggttcgttttaaatttgaggtttgaattgttgaggttagaatttattatgaattttagtttggaggaaagatttttaggaaggttttgaagtttagttataatttgagtgatggttttattagtattataaaagttttaggatggggttttgtagtattgggttcgggtagtggtttagatgttgacgagtggtgtagcgtcgggtaagtttttttatttattgagtagatttagttattttatttgtaaaatgggattaaacgtttcggttgttttagtattaaatgagatcgttcgaaagtattttttaaatattattatcgattataaaaagtaaatgggaagtcggagtcgattttagagggttgatttggtatagtattttaaatttttcgttttataaagtacgaggcgcgagtttgtttcgttgttaggatttgttttttttttatttagtattcgtttcgggttcgagagtcgcggtgcggtcgtgcgtataggagggagggaggcggtgtggggtttcgggtagagttgttgagagtttcggtttcgtatttgattcgcgttttttcggcgggatttcgggttagggtttttaggtcggcgcgtagggcggggagcggttgcgggcgggaggacgggcggggcggcgggcggttacgcggtttgggcggagtcgttttcgttttggttttcgcggttgttttgttttcgttagttttaggtttttcgggttcgcgtcgcgtcgtttttttttcgatagtcgtcgggggtgttttgtaagttgtttcgcgcgttttgttcgtttgttttcgcgggtcgtcgttcgttatagtcgcgttatgattatttagtagatagatttttagggttcggggtcgtggggttttcgtttcgtgggcggtaaggatttcgagtagtttttcgttatttttcgggtaagagtagttgggacgtgcgtggaagcggggcgttatgggaggtgatatgcggagattggggtttcgcgggcgcggtcggggacggagtcggaatcgtagtcgggcgcgtttaggtgcgttgttagttgagcgtttttcgcgcgttcgggtttcgtcgtttttcgtcgttttttcgcggaggttgcgttttcgggttggtcggttcgtcgcgggcgcgtttcgtgttcgttagaaaaaaagaaggtagttttcgttttttggtttcggaagcgcggcggggcgggtgttagttttttgttaattagcgaggggacgagggttttcgtagatttcgcgcgttgggagatggtattttttttttttttttagatcgtagtgtagtcgaacgtaataggaaagatttggaaagtgaggtggggtgggtgggaagtttattggggtggggggtaagtgggattaatttaaaaaaataatcgaaatacgttttttggatttgatttacggtcgaggttcgt

SEQ ID NO: 603 - DNA, 2388 bp, Artificial Sequence
  chemically treated genomic DNA (Homo sapiens)
aatttttattgaatttatttgaaggttttgtaggttttataataaattttatttagttttgtattaggtatgttatagaattaacgaattcggagatgaagttaggttttttagtttagtttgcgaggaagataggtgattcgaattttaagaatgtaaaagatgggtcgggtgtggtggtttatgtttgtaattttagcgttttgggaggtcgaggtaggtagattatttgaggtcgggaggttgagattagattgattaataacggagaaatttcgtttttatttaaaaatgtaaagttagtcgtgcgtggtggtttatgtttgtatttttagttattcgggaggttgaggtaggagaattatttgatttttggaggcggaagttgcggtgagcggagattgcgttattgtatattagttcgggttataagagcgaaatttcgttttaaaaaaaaaagtaaaagatattattaagttttgcggagtaaggtattttatattttatgagcgagttaagatgggttttataattttttaagtaaggaaacgggttcggaggttttgaatatttgttatttaatagtagaatagttattggaattaaaattttttgattttaaataatagtttcgtttattattattaagtgaagttatttataattatatatcgattattttaagtttttgtaagatcggttcgttttggggaataggttttgagagaatattttttttaaggttagaataaaggtattttataggttttaggtcgtgtttcgagggcgtttatttaaatatgagttggagtaaaaagaaagggatgggggatttggagtaggtataggggcggtttttttaagtagggtggtttgggatttttaagggttagcgagaagagaatatatattttagttttcgttttattcggttagatattgacggttgggatgtttgataaggaattttttttcgttatattgagaaatattcgtagcggtttatttaggtttgattttcgggtggtgcgtgtgttgcgtgtcgcgttacggcgttacgtggttagcgcgggtttgtggcgcgagtttttgaaattaggcggtagaggcggagtcgttgtggtattgttgcgtttttgttgcgtttcgggtgttttttgcggcggtgggtcgtcgtcgggagaagcgtgaggggatagatttgtgatcggcgcggtttttgttagtttatttcggttaaaaaagaattgtatttttggagcgggttagtggtggtggtagtgggttgggacgagcgcgtttttcgtagttttagtttagcgtggcgggggagcgttttacgtttcgggtcgttgtcgcggttttttgtttttttgtttttgttaatttttatttatgtttgagagaaaggtttttgttcgaaggtagattttcgttaagtaaattcgagtttcgttttttttttgggtttttatttttcgttttcggttcggtttttgggtttcgtttttagtttaagatttaattttttttttagttgttttagatgacgttatttgaaattttttggaaatacgattattttaacggaatattgttgttttggggaagtgttttatagttgttgggtacgttgtatttgttttatttaagtttttggtaattgttgtatttcgaagatatgttgatgggaattattaggcggcgttggtttttaattggagttttttgtttttattagttacgcgttattggttagcgtgattgaaattaaatcgtatgaaaatttttttttttagtcgtattagttacgtttcgagtgtttaatgtggttagtggtatcggtttggatagtatagttgtaaaatgtttttatttttatagtaagttgttatcgttttaggagatgggattgaattagaatttaaataaattttttagcgtttttgagttttattttagttatataataaggaatgtatttttgtgtaagtgtattttggttttttgttttgtagatttatttattaagtattggaggaatatcgtaggtaaaaatgtttattggatttaaagagaggttaatattttttgaaatttttaagatacgttgtaataaagtaggtattgataaattttatataattttataaattatatcgagaaagtgttttttaaaaaatgtttgttaaaaatttagtacgttatagtgttgtttagaattataaattgttttttatgtgtgtataaatttagttaataatataattatcgtttgtaggttaattatatgataaatatagaacgtttagtggataaagaggaaattggttttttgattagtagtaggaataattattaataaattagaagtattaatgttatttt

SEQ ID NO: 604 - DNA, 2388 bp, Artificial Sequence
  chemically treated genomic DNA (Homo sapiens)
aaagtaatattaatgtttttgatttgttagtaattgtttttattgttagttaaggggttagttttttttttatttattagacgttttatatttattatgtggttaatttgtaaacgatgattatgttgttaattggatttatatatatataaggaatagtttatggttttaagtaatattgtgacgtattgggtttttagtaagtattttttagaaaatattttttcggtgtaatttataaagttatataaaatttgttaatatttgttttgttgtagcgtgttttaaaaattttaaaaaatgttggtttttttttggatttaataggtatttttatttacgatatttttttaatgtttggtaaataagtttgtaaaatagaagattaaaatgtatttatatagggatgtattttttattatgtgattgaggtaaaatttagaagcgttggaaaatttgtttgaattttaatttagttttattttttggaacggtaatagtttattgtgaggatgggaatattttatagttgtgttgtttaaatcggtgttattagttatattaagtattcgaaacgtggttagtgcgattagagaagaggatttttatacgatttagttttaattacgttaattagtgacgcgtggttagtggggatagagggttttagttagagattaacgtcgtttggtaatttttattagtatgttttcggaatatagtaattattaggggtttaagtaaggtaaatatagcgtgtttagtagttgtaaaatatttttttaaaatagtaatatttcgttaaagtgatcgtgtttttaagaaattttagatggcgttatttgggatagttgggagggaagttaagttttgagttgaaggcggagtttaaaggtcgggtcggaggcgggaaatggagatttagggaaggggcggggttcgaatttgtttggcgaaaatttgttttcgggtaaggattttttttttaggtatgggtgggggttggtagagataaaagggtaagaagtcgcggtagcgattcggggcgtgaggcgttttttcgttacgttggattgggattgcggaagacgcgttcgttttaatttattattattattattaattcgttttagaggtgtagtttttttttggtcggagtaagttgataaaaatcgcgtcggttataaatttgtttttttacgtttttttcggcggcgatttatcgtcgtaaaagatattcgaggcgtagtagaggcgtagtagtgttatagcggtttcgtttttgtcgtttagttttagaagttcgcgttataagttcgcgttggttacgtgacgtcgtgacgcgatacgtagtatacgtattattcggaagttaggtttgggtgggtcgttgcgggtattttttagtgtggcgaaaggaaattttttgttaggtattttaatcgttagtatttgatcgaataaagcgggagttggagtgtgtgtttttttttcgttgatttttaagagttttaggttattttgtttggaggggtcgtttttatgtttattttaagttttttatttttttttttttgttttagtttatgtttgggtgggcgttttcgggatacgatttgggatttatgaaatatttttgttttgattttaaaagggatgtttttttaagatttgttttttaaagcgagtcgattttataaaagtttagagtggtcggtgtgtggttgtggatgattttatttagtggtagtgggcggggttgttatttgaaattagaggattttagttttagtagttgttttgttattgggtagtaggtgtttaagattttcgagttcgtttttttgtttgaaaaattgtgaaatttattttaattcgtttatgaagtgtgaggtattttgtttcgtagggtttggtagtattttttgtttttttttttgagacggagtttcgtttttgtggttcgggttggtgtgtaatggcgtaattttcgtttatcgtaattttcgtttttagggattaagtggtttttttgttttagtttttcgagtagttgggaatataggtatgggttattacgtacggttaattttgtatttttaagtagagacggggttttttcgttgttggttagtttggttttaatttttcgattttaggtgatttgtttgtttcggttttttaaagcgttgggattataggtatgagttattatattcggtttattttttgtatttttaggattcggattatttgtttttttcgtaggttgaattggaagatttgattttattttcgaattcgttggttttgtaatatgtttaatataaggttgaatagggtttgttgtaagatttataaaatttttaaatggatttagtgagagtt

SEQ ID NO: 605 - DNA, 2256 bp, Artificial Sequence
  chemically treated genomic DNA (Homo sapiens)
aaatttttattataaataaattatattaagtaagttaaagatagtaaaagagtaaaaatgttagtagatatttttaaaatggtaattatatattatttttggaatgattatatgaatgtggtttattattttttaagtttttatagtaaatatatatttatttgttttatttagttaaaaataaatataatatgtagttgtttttgaataatttttttttttttttttttttttttttttttttcgataaagttttattttgttatttaggttggagtgaagtggttttatttcgttgtttattataattttagtttttcgggtttaagcgatttttttgttttaatttttcgagtagttgggattataggcgtttgttattattttcggttattttttgtatttttagtagaggcgaggttttatttgttggttaggttggtttcgaattttcgattttaggtgatttttttcgttttgattttttaaagtgaagggattataaggcgtgaggtatcgcgttcggtcgtttttgaataatttcgattaaaatttatattcgatatttattttaatatatattatagatttttattgataattttttttagtaagaaagataagttttatttaggtatttgtgaattggaggttaagtagttttagtatattttatatttttttaagattttttttttattttaaacgttcgtaaattttgtatttgataaagagtatatttttatttaatataaatatgtttttttttttagatttttttagtattcgagagatttgtacgcgcgtggttttttattttttttttttggttttttaagtttttagggcgtcgttaggaggaggtttgtgattataaattttttttgaaaattttttaggaagtttttttttttttcggagaatcgaagcgttatttgattttaatttttttgtaaatttcgttttttagagtcgttcgttattttttgttttcgttgtagattttttatttatttggatcggttttcgatcgtaattattcggtgcgttgggtagcgttttcgtttttagtagcgttcgtattttttttattcgatttcgggtcgcggtcgtggttagttagttagtcgaaggttttatgttgtttttcgtcgtcggttttatgttgtttttcgtcgttcgttgtttgtttttttttttttcgtagtcgtcgagcgtacgcggttcgttttattttttggtgattagttagtttttttttttttttttttcggtgttggcggaagagtttttttcgattttgttttttaaattttttggagggatcgcggtatttttttaggtaaggggacgtcgtgagcgagtgttcggaggaggtgttattaatttcgagtatttagcgaatgtggtatttttgaagtcgttttaggttgggtttttttcgggggtattagtcggaagtagttttcgttagagttagcgttggtaaggaaggaggattgggtttttttttatttgttttttatatcgtttttcggtttttttgtttttagtcgcgttttttcgtttgttagtaaaggcgtgtttgagtgcgtttattttgttaaaaagaaattcgttttcgtttcgtttttttttttcgcgatataatttttttaattgttaaattgaatcggggtgtttggtgttatagggaaagtatggtttttttttttaattataagaaaaagtaaaattatttttttttagttgtgagagttttatcgagaatcgaaattatttgtacgattagaaagtgtttttttatttttttaatttttgatttttaggagcgcggggtttattaagttagaaattttagtttaaaggattttttttggagagtcggattgtttttttttttttttttttttttttttttgcgtgtaaaacggttgtttggggtaagggttttttagacgtgtatattgtttggtataagagtagattttgaaaagatgaggtttatttaatacggacgggggagaattttgtttgtaggtagataggaaaatggggagggagttattggaaggacggattttatttttaaagttataatttttagattagaaaaagtgtttagtgttttagaagtagagttgtatagtgatttaaagattagttttaaatattgttttgttttttttatattttttatattttttttttttattgaaaatattttgtatttttcgtaattataaagggggaagg

SEQ ID NO: 606 - DNA, 2256 bp, Artificial Sequence
  chemically treated genomic DNA (Homo sapiens)
ttttttttttttataattacgaaaaatgtaaggtatttttagtaggaaagagaaatgtgagaagtgtgaaggagataggatagtatttgaagttggtttttggattattgtgtaattttgtttttagaatattgagtattttttttggtttaggaattatgattttgagaatggagttcgtttttttaatgattttttttttatttttttatttgtttataggtagaattttttttcgttcgtattaaataaattttatttttttagagtttgtttttatattaggtaatgtatacgtttgagaaatttttgttttagatagtcgttttatacgtaggaggggaaggggaggggaaggagagagtagttcgattttttaaaaggaattttttgaattagggtttttgatttagtgaatttcgcgtttttgaaaattaagggttgagggggtagggggatattttttagtcgtataggtgatttcgattttcggtggggtttttataattaggaaagaatagttttgtttttttttatgattaaaagaagaagttatattttttttatgatattaaatatttcgatttaatttggtagttaggaaggttgtatcgcggaggaaggaaacggggcgggggcggatttttttttaatagagtgaacgtatttaaatacgtttttgttggtaggcgggggagcgcggttgggagtagggaggtcggagggcggtgtggggggtaggtggggaggagtttagttttttttttttgttaacgttggttttggcgagggttgttttcggttggtgttttcgggggagatttaatttggggcgattttaggggtgttatattcgttaagtgttcggagttaatagtatttttttcgagtattcgtttacggcgtttttttgtttggaaagatatcgcggtttttttagaggatttgagggatagggtcggagggggttttttcgttagtatcggaggaagaaagaggaggggttggttggttattagagggtggggcggatcgcgtgcgttcggcggttgcggagagggggagagtaggtagcgggcggcggggagtagtatggagtcggcggcggggagtagtatggagttttcggttgattggttggttacggtcgcggttcggggtcgggtagaggaggtgcgggcgttgttggaggcgggggcgttgtttaacgtatcgaatagttacggtcggaggtcgatttaggtgggtagagggtttgtagcgggagtaggggatggcgggcgattttggaggacgaagtttgtaggggaattggaattaggtagcgtttcgatttttcggaaaaaggggaggttttttggggagtttttagaaggggtttgtaattatagatttttttttggcgacgttttgggggtttgggaagttaaggaagaggaatgaggagttacgcgcgtatagatttttcgaatgttgagaagatttgaaggggggaatatatttgtattagatggaagtatgttttttattagatataaaatttacgaacgtttgggataaaaagggagttttaaagaaatgtaagatgtgttgggattatttagtttttaatttatagatatttggatggagtttattttttttattaggagggattattagtggaaatttgtggtgtatgttggaataaatatcgaatataaattttgatcgaaattatttagaagcggtcgggcgcggtgttttacgttttgtaatttttttattttgggagattaaggcggggggaattatttgaggtcgggagttcgagattagtttggttaataggtgaaatttcgtttttattaaaaatataaaaagtagtcgggggtggtggtaggcgtttgtaattttagttattcgggaggttgaggtaggagaatcgtttgaattcgggaggttgaggttgtagtgaatagcgagatggagttattttattttagtttgggtgatagagtgagattttgtcgaaagaaagaaagagagaaagagagagagaaaaattatttagaagtaattatatattgtgtttatttttaattgagtagggtaaataaatatatgtttgttgtaggaatttaggaaataatgagttatatttatgtgattattttagaggtaatatgtagttattattttgggaatatttgttaatatttttgtttttttattatttttagtttatttgatatagtttatttgtgataagagttt

SEQ ID NO: 607 - DNA, 2226 bp, Artificial Sequence
  chemically treated genomic DNA (Homo sapiens)
ttggtttgtaatatattatatatttaaaagaattattatttttttgaatattattaatattaataatagtattatagtgattaagagtggatttaaataaaggttggtttgaaatttaggtttgttatttattagtaagtttttaaaaattttgagtttttagtttttttatatgtgaaatggagaaaataaatttgtaaaattaattaaatttgtttatttatatttttttttttagtgtatattaattggtatttttcgttaggttagaatgtgtttttaattatgttttaaattcgttttgtgttaattttattgttagaattttttttattttgagaattagaaaaggaaatattatgtttggtaatgtttatattttttaaaataaatttgtaggaaagaatatttagtaagtgatgagagtagtaacgattgtttttattattttaaatttataatattattttttttagagttttttaagtattgtagataattttttatttattaaaaaataaattgtaattataagtatttagggttgatattgtttttgaattagatagtgtttatattagttgtataagattaatttaaagtagaggatgaaattttttttttgaattttttttagaacgtaatttagtgaatatattaaaattaaattttttttgaatgggagtaatttttacggattaatttgtaattttttagattatatttaaggtaatgtagaggttgttgtattataggttttgtgattagagattattggatttgtttttggaaaagttatttatgattttttgggttttggtttttttattttttatatcggtttaataatgattatcgtagagttgttatggaagttaaatgaatttatgtattataagtgattaatataatgattgatatttagtgatttattaataaattaaaatatttattattaatatgatagagaaggtgtcgttaaaatagataataggtttttggaagaggtgattaaatggatgtaaaatttatggattgtttatttcgtttatttttgttgtgttttttggttgtggtatatatacgtgtgggtataaaatcgtaaattttatgtagtcgcgtagtgtatgcgtagaaggtttagatacgaaatgttattttagtaatgtgtttagagaagttttgacgtcgttttggaagtaagtcgttgttgtttgatttttgggcgtttgggacggatgtttatatttgtatttagtagtattggaaggggtttaggtttttcgtagtatagtttatttttagatcgtttagttttttataatatatatttttacggaaaagggtattttttttcgttagaaaaagcgttttagtttggtttgggttggtttttattttacgttgttgtaagtaggcgaagttttttttgtttttttttttggggtaagtggaaaggagttcggtagggggttcgtagtggtttgtataggggaattgggtagcgagagagttttaggtaatttcgggggttgttttatagaagtaggtggggatcgatagtggtttttcggtttagggaggagagcgcggtcgcgggtttttttttttagtttggaggttgtagtcgttcgagtcggttcgggtgggggcggggtgggggcggcgcggagggtacggagattacggcggcgttattcgggatatttagggtttcgaggttttgggcggtttttacgcgagatcgtaaattatgataataggtagttattcgaggttaaataaaaacggagtgggtttttcgcgcgtcgtcgtttttcgcgtttttggcggtttttttcgaggttttcggcggttttacgagttcgtagtagtcggtggcgacgtcgttttcgttttatttttttgcgtaagtgcgaggttgtcggtagcgcggcgtacgtttcggtcgttttcggttttcgcgtaaaatttttattttgtttacgtgaagttgtcgttgttttagagagggggaaagagttgcgggaaaagtcggggagtgacgattgcggcggttgggcgcgtttttttattttttttttttttttttttttttttgtcgtagttcggagttttggttttttttttttttttttttttttcggagtcggttttttttttcgtttcgtttttttttcgtttgtgtacgttatttgttgtggggtggtcgaaggggatgttttg

SEQ ID NO: 608 - DNA, 2226 bp, Artificial Sequence
  chemically treated genomic DNA (Homo sapiens)
taggatatttttttcggttattttataataaatagcgtatataagcgggggagaagcggggcggagggagaagtcggtttcgagggggaggaggaaaggagaggagttaaaatttcggattgcgataggggggaaaggagaagaaaagaaaatgagagagcgcgtttagtcgtcgtagtcgttatttttcggtttttttcgtagttttttttttttttttaaggtagcgataattttacgtggataggatggaagttttgcgcggaagtcgggaacggtcggagcgtgcgtcgcgttgtcggtagtttcgtatttgcgtagggaggtggggcgggggcgacgtcgttatcggttattgcgggttcgtgaggtcgtcgggggtttcgggggaggtcgttagggacgcggggggcggcggcgcgcgggggatttatttcgtttttatttgatttcgggtgattgtttattgttatggtttgcgatttcgcgtggggatcgtttagggtttcggggttttggatgtttcgggtggcgtcgtcgtaattttcgtgtttttcgcgtcgtttttatttcgtttttattcgggtcgattcgagcggttgtagtttttaggttgaggggagggattcgcgatcgcgtttttttttttgggtcggagagttattgtcgatttttatttgtttttgtggggtagttttcggaattgtttggaattttttcgttatttagtttttttgtgtaggttattgcgggttttttgtcggatttttttttatttattttaagggaggagatagaagggatttcgtttatttgtaataacgtgaaataaaaattaatttagattagattggggcgttttttttgacgggaggaaatattttttttcgtggagatatatgttatgaaggattaagcggtttggggataggttgtgttgcgaagggtttgggttttttttagtgttgttgggtgtaggtataggtattcgttttagacgtttaaaggttaggtagtaacgatttatttttaaggcggcgttagagtttttttaggtatattgttgaaatgatatttcgtgtttaagttttttgcgtatgtattacgcgattatataggatttacgattttatatttatacgtgtgtatgttataattaggggatatagtaaaggtagacggaataaataatttataaattttgtatttatttaattattttttttaaaaatttattgtttattttagcggtattttttttgttatattgataataaatgttttaatttattgataaattattgagtgttaattattgtattggttatttatggtatatgagtttatttaatttttatgataattttacggtggttattattaagtcggtataaaagatgaggaaattaaagtttaaagaattatgagtgatttttttaaagataaatttagtggtttttaattataaagtttatgatataataatttttatattattttaggtgtggtttaagagattatagattaattcgtagaaattatttttatttaaagaaagtttagttttaatatatttattaagttacgttttgaaaaaggtttagaaaaaagattttattttttattttaggttggttttatgtaattgatatgagtattgtttaatttaaaagtagtattaattttgaatatttatggttataatttattttttaatgagtggggaattatttataatgtttaagaggttttagaaaaggtggtgttgtaaatttaaaatgataaaggtagtcgttgttgtttttattatttattgggtgtttttttttgtagatttattttggagggtgtaggtattgttaggtataatgtttttttttttggtttttaaggtagaaagggttttggtagtggggttggtataaagcggatttggagtatggttgagagtatattttggtttaacgaggaatgttagttaatatatattggagagaaaaatatgaatggatagatttaattaattttgtagatttattttttttattttatatgtgagaaaattaagggtttagaatttttagaagtttgttaataaatggtagatttgagttttaagttagtttttatttaagtttatttttagttattgtgatgttattattagtattaatggtatttagaaaaatagtaatttttttaaatatgtaatatattataagttaa

SEQ ID NO: 609 - DNA, 2301 bp, Artificial Sequence
  chemically treated genomic DNA (Homo sapiens)
aatatttagaataaatggagatttgtaaattaatagaaagtaggtagtaaagttaaagaaaatagtttaaggtatagttattaaaaggaacgtgattatgttttttgtagggatatgggtggagttggaagtcgttagttttagtaaatttatataggaatagaaaattagcgagatcgtatggttttatttataagtgggagttgaataatgagaatatatggttatatggcggcgattaatatatattggtgtttgttgagcggggtgttggggagggagagtattaggaagaatagttaagggatattgggtttaatatttgggtgatgggatgatttgtatagtaaattattatggcgtatatatttatgtaataaatttgtatattttttatatgtattttagaattttaaataaaagttggacggttaggcgtggtggtttacgtttgtaattttagtattttgggaagtcgaggcgtgtagattatttaaggttaggagttcgagattagttcggttaatatggtgaaatttcgtttttattaaaaatataaaaattagttagatgtggtacgtatttataattttatttattcgggaggttgaagtagaattgtttgaattcgagaggcggaggttgtagtgagtcgtcgagatcgcgttattgtattttagtttgggttatagcgtgagattacgttataaaataaaataaaataatataaaataaaataaaataaaataaaataaaataaaataaaataaaataaaataaaataaaaaaataaaataaaataaaataaaataaagtaatttttttttttttaagcggtttttattttttttttttgttttgtgaagcgggtgtgtaagtttcgggatcgtagcggttttagggaattttttttcgcgatgtttcggcgcgttagttcgttgcgtatatttcgttgcggttttttttttgttgtttgtttattttttaggtttcgttggggatttgggaaagagggaaaggttttttcggttagttgcgcggcgatttcggggattttagggcgtttttttgcggtcgacgttcggggtgtagcggtcgtcggggttggggtcggcgggagttcgcgggattttttagaagagcggtcggcgtcgtgatttagtattggggcggagcggggcgggattatttttataaggttcggaggtcgcgaggttttcgttggagtttcgtcgtcgtagttttcgttattagtgagtacgcgcggttcgcgttttcggggatggggtttagagtttttagtatggggttaattcgtagtattaggttcgggttttcggtagggtttttcgtttatttcgagattcgggacgggggtttaggggatttaggacgtttttagtgtcgttagcggtttttagggggttcggagcgtttcggggagggatgggatttcgggggcggggagggggggtagattgcgtttatcgcgttttggtattttttttcgggttttagtaaatttttttttgttcgttgtagtgtcgttttatatcgtggtttattttttagttcgaggtaggagtatgtgtttggtagggaagggaggtaggggttggggttgtagtttatagtttttcgtttattcggagagattcgaatttttttattttttcgtcgtgtggtttttatttcgggttttttttttgtttttcgtttttttcgttatgtttgtttttcgttttagtgttgtgtgaaattttcggaggaatttgtttttttgttttttttttgtatttttgattttttttcgggttgttgcgaggcggagtcggttcggtttttatatttcgtattttttttttttcgtaggtcgttgcgcggttttgcgtatgttgttggtagattagggttagagttggaaggaggaggtggtgatcgtggagacgtggtaggagggtttatttaaagttttttgcgtaagtgattatgttcgggtaaggggagggggtgttgggttttagggggttgtgattaggatcgggggacgtttaagtttagtgtttttttttgagttatgttttttttaatagttatacgggtagttttttaagttttaggacggagattttattttgtattagtttaatattattttgcgttatttgggtcgtatttttggtgagttttgaatttttaagtttagggtaggtatgggtaagtttttgttttcggagtttttttgtttaaattagttgtttcgtagttttttggagtggaggaaattgagatttattgagg

SEQ ID NO: 610 - DNA, 2301 bp, Artificial Sequence
  chemically treated genomic DNA (Homo sapiens)
ttttagtgggttttagttttttttattttagagggttgcggggtagttgatttaaataaaagggtttcgggggtagaggtttgtttatgtttgttttggatttggaggtttaagatttattaagggtgcggtttaggtgacgtaggatggtattggattggtatagggtgaggttttcgttttggaatttggggagttgttcgtatagttgttgggggaggtatggtttagggaggggtattgagtttgggcgtttttcgattttagttatagttttttaaggtttagtattttttttttttgttcgggtatggttatttacgtaggaggttttgagtgagtttttttgttacgtttttacggttattattttttttttttagttttggttttgatttgttagtagtatgcgtagggtcgcgtagcggtttgcggggagggagaagtacgagatgtggggatcgggtcgatttcgtttcgtagtaattcggggaggggttaggagtgtagggagggaatagggaaataggttttttcgaagattttatataatattggggcggggagtaggtatggcgggagaggcggggaataggaaggaggttcggggtaaaagttatacgacggagggataagggggttcggattttttcgggtgggcgaggggttgtgggttgtagttttagtttttgttttttttttttgttagatatatgtttttatttcgaattgggaaatagattacggtgtagggcggtattgtagcgaataaagaaaagtttgttggagttcgggggaggatgttaaggcgcggtgagcgtagtttgtttttttttttcgttttcggggttttattttttttcgaggcgtttcgggttttttgaaagtcgttaacggtattggggacgttttgggttttttaggttttcgtttcgggtttcgaggtgggcgaggagttttgtcgggagttcgggtttgatgttgcgggttggttttatgttgggagttttgagttttattttcggggacgcgggtcgcgcgtatttattggtggcgaagattgcggcggcgaaattttagcgaaggtttcgcggttttcgagttttataagggtggtttcgtttcgtttcgttttagtgttgagttacggcgtcggtcgtttttttggagggtttcgcggattttcgtcggttttagtttcggcggtcgttgtatttcgggcgtcggtcgtagaggggcgttttggagttttcggagtcgtcgcgtagttggtcggggaagttttttttttttttttaggtttttagcggggtttagggagtaaatagatagtaggaagaggatcgtagcgaagtgtgcgtagcgaattggcgcgtcgggatatcgcggggggaaattttttaagatcgttgcgatttcggagtttgtatattcgttttatagggtaggggagaggggtggaggtcgtttagaggaaaggaaattgttttattttattttattttattttatttttttattttattttattttattttattttattttattttattttattttattttattttgtgttattttattttattttatgacgtagttttacgttgtggtttaggttggagtgtagtggcgcgatttcggcggtttattgtaattttcgtttttcgggtttaagtaattttgttttagtttttcgagtaggtggaattataggtgcgtgttatatttggttgatttttgtatttttagtagagacggggttttattatgttggtcgggttggtttcgaatttttgattttaggtgatttgtacgtttcggttttttaaagtgttgggattataggcgtgagttattacgtttggtcgtttaatttttatttgaagttttggggtatatgtagaggatgtgtaggtttgttatataggtgtgtgcgttatgatggtttgttgtatagattattttattatttaggtattaagtttagtattttttagttattttttttggtattttttttttttagtatttcgtttaataggtattagtgtgtgttgatcgtcgttatgtgattatgtgtttttattgtttagtttttatttataagtgagattatgcggtttcgttggttttttgtttttgtgtgagtttgttgaggttaacggtttttagttttatttatgtttttgtaaaggatatgattacgttttttttagtggttgtgttttaggttattttttttggttttgttgtttattttttgttgatttgtagatttttatttattttagatatt

SEQ ID NO: 611 - DNA, 2485 bp, Artificial Sequence
  chemically treated genomic DNA (Homo sapiens)
agtttttgtggatgaattgtaatttagtttaataggtagataagattgaaaatttaatttaggagtatgtgtttttaataatagttgagttttggttaattttagtggttatattttaattatttatatattgttgagtgtttaaattgtgtttaaagaaggtaaaagttaatttgtaattaatttagttgtttttttgttttatttttaatttttgtatgttatttttttttttttgtttataaatatgttttgattatgaggtatttttggagtttttgaattcgttgtgattttggaagttgttttattcgtaaattatttattatttaattaaattgttttaaatttaattttgttgaagtttttttttaataggtttagaaaaaataatggtaaaaatgaatgaaaatttaataattttggaagtagaaaaggttgggggttttaataagtgtaaatagttttatttttatattttttttatggtaattataatttagtatattatatatatatttttttgtttttcgtattttggtttagggtaaagttttttaaaataggtattgttaattagtgttattaagaaggtttggatgtcgttttgtgggaatattttaaagaggaatgtttaaaaggaaaagggggatgggttgggagaagggtattaggcgggtattttaaaattatttttagggttataggtttaatttatttggttgtggacgttagagtcgttatggtaagaaggaagtaaagttttttgtaataattaaagtttttagaagtagcgtgttttattgtttattagtgcgtcgtgaagtttggtgtttatttatagggttttttttagtattgtttaggtttttcgagtgttttagtatagtagtttggagtttgttggtttggtgattaagatatattttagggaatatgttatgtagtggagtttttttttcggtattgtatagtaaaaggaaagggtcgttgggtgtttgtgggttttgggtagttatagaagttatcgcgttggcggggaggagggggatcgatgcggtttatgtttcgggtagttttattttttttgtttgcgaagggtttttgttcggcgggaggagagaggcgcgttttattcgggtttttttatatttgtcgtcgtttgggtcgatttcgcgggtttcgttcggcgttttagtcgattttcgtttagtttcgggtttatgggcgcggttagtagggcgggttagggcggcggggcgcgatattgggaggaagtgcgggtcgtttgttcgggcgcgttaaggaagttgtttaaaatgaggaagagtcgcgggttcggcggttgaggttatttcggcggcggttggagagcgaggaggagcgggtggtttcgcgttgcgttcgttttcgttttatttggcgtaggtaggtgtggtcgcgttttttattcggtcgggattttttggtaaggagaggaggttacggggaacgacgcgttgtttttatgtttttttttgttttatttttatcggtcgaggtaaaagtgttgaaattatgtgaataaaatataggtgggtttcgttagtttcgtttttgaatttattcgcgttcgggatttagaagttgcgtcgggagagaggggtttaggtttgggcggaggggacggaggttagatcgtgcggaaagtgattcgggtattttagggcgtttaggtttttagggagcgcggaaagtgcggtcgcggttcggttttcgggagacgcgggattgggattaggtatagcgcgaggaagtcgattttggagttagaatatttttttttggttatttatacgaatttattggaaaatgtcgtagtgtttattaaagttatttaaagtagaaatgtttagacgttttatgagtttagataaattttttattataaaaagaaatagtagttgtatttaaataataatttttttgaattattattaaaatttagtataattatttttgtggatatatttttattgttaagtaatttatttagttaatgaatttggagagtaagaaagttttatgtagtaaaatgtaaatttgagttaagagttaagggtgtttttttttgtttgtttgtttgtttttggtaatgtggttttaaaattttaagtttatttaaaaattatataaatgtaatttatttttttgttggaatgtttaaggattagaaagataattggagaagtgagagtttgaatttttttttacgttggaaatagtgttgtaaaatattttttgagttttgtttgatttagtaaagatttagtcgaatttaagtagagtttaaagtattgtagcgtgtagtaaaaaaaaaaaagagttgaagatgttgtgttatatttgatttttggtattaaaaataaaaaaaggaattatttaatttttaagagtttttggaagaaatggaattgattttattatttgatttttttgttttagt

SEQ ID NO: 612 - DNA, 2485 bp, Artificial Sequence
  chemically treated genomic DNA (Homo sapiens)
attaagataaagaagttagatggtagaattaattttattttttttaggaatttttagggattaaatggtttttttttttatttttaatattaagaattagatatggtataatatttttaatttttttttttttttattatacgttgtaatgttttgaattttatttgagttcgattgaatttttgttaagttaggtaaaatttaaaaaatattttgtaatattgtttttaacgtaaaaaaagatttaaatttttatttttttaattgtttttttagtttttgaatattttaataaaagaatggattgtatttatatagtttttaggtgggtttaaggttttggagttatattgttaaaaatagataaatagataaaaagaaatatttttaatttttaatttaaatttatattttattatataaaatttttttgttttttaagtttattggttaagtaaattatttgataatgaaaatgtatttataagagtaattatgttaaattttagtagtggtttagaagggttgttgtttgaatgtaattgttgtttttttttgtagtaaaagatttgtttaagtttataagacgtttggatatttttattttgagtaattttgataaatattgcggtattttttagtggattcgtgtaaatggttaaaggaaaatgttttagttttaagatcgattttttcgcgttgtgtttgattttaatttcgcgtttttcgagggtcgggtcgcgatcgtatttttcgcgttttttgggggtttgggcgttttggggtgttcgggttatttttcgtacggtttgattttcgtttttttcgtttaggtttgagtttttttttttcggcgtagtttttggatttcgagcgcgggtaggtttaggagcgaagttggcggaatttatttgtattttatttatatggttttagtatttttatttcggtcgatgaaggtagaataagaaagggtatgaaagtagcgcgtcgtttttcgtaattttttttttttattagaaagtttcggtcgggtaggggacgcggttatatttatttgcgttaggtgaggcgagggcgggcgtagcgcggggttattcgttttttttcgttttttagtcgtcgtcggggtggttttagtcgtcgggttcgcggtttttttttattttgggtaatttttttaacgcgttcgggtaggcggttcgtatttttttttagtgtcgcgtttcgtcgttttggttcgttttgttgatcgcgtttatgagttcggagttgggcgggaatcggttgaagcgtcgggcgaggttcgcggaatcggtttaggcggcggtaggtgtagaggagttcgggtggggcgcgttttttttttttcgtcggataagggtttttcgtaggtagagaaggtggggttgttcgggatatggatcgtatcggtttttttttttttcgttagcgcggtggtttttgtgattgtttaggatttatagatatttagcggttttttttttttgttatgtagtgtcggggaagagattttattgtatggtatattttttggagtgtattttggttattaaattaataagttttaagttattgtgttggagtattcgggaggtttgggtagtgttgagagggattttgtaggtgaatattagattttacggcgtattagtgggtaatggggtacgttgtttttgaaggttttaattattataaaaggttttgttttttttttattatgacggttttgacgtttataattaaataaattaaatttatagttttaagaatggttttgagatattcgtttgatattttttttttaatttattttttttttttttttggatatttttttttaaaatgtttttataaaacggtatttagatttttttgataatattggttggtagtgtttgttttaaaaagttttattttaagttaaaatgcgagaagtaaaaaaatatatatataatgtgttggattgtaattgttatggagaaaatatagggatgggattatttatatttattggagtttttagttttttttgtttttagggttattggatttttatttatttttgttattattttttttaaatttgttaaaagaaaattttagtagaattaaatttaaagtagtttaattgagtaatgaatgatttgcgaatggggtagtttttagaattatagcggatttagagattttagggatgttttatggttagaatatatttatagataaaaaaagggaagtgatatatagaaattggaggtaaggtagagaaataattggattggttataggttggtttttgttttttttgaatatagtttgaatatttagtagtgtatgaatggttgaagtatggttattgggattggttaagatttagttattgttaaaggtatatatttttaaattaggtttttaattttgtttgtttattaagttaggttatagtttatttataaggatt

SEQ ID NO: 613 - DNA, 2424 bp, Artificial Sequence
  chemically treated genomic DNA (Homo sapiens)
taaaaataatatagtaattttttagatttgtagaatgtttttttgtttataagtttgttttatatatattatgttttttaaatgatatattagttttttgagggtaatttatattggtaatagtttttagatgtggaaattgtgaagataatgttggtgatgtggaagtaatataaattttggagttttttagatttaggtttgaatgttagattgttttttatttagagtaattttagagtattattttttattttaatttttttttaggtttttttgtgtttatgtgttttttttatttttgtttattgtttatttagtgatttttgtatttttttttattgttagtgtgtagatatatagtttttttggttttgagatttatgttaattttattttattattttgttagtttatttaatttttattgagtaatgttagttgaaagttgtggtgggattaaatgttgtaatgagtatttaaatgaggttgaagtatttacgtattttatttatatatggtgaggtatatttaaggaaggttgtagttattaaaattttaggaaataattttttatttttttaggtgaaagggtttttaggtttttgtgttttggaaggtttatttatagttattttttaaatgataatgcgattgatgagtttagagtttagtttaaatagtaatggattggaagattagtttaggttttattaatgtggaatatagaataaattatgtttttgttttagtttgtttatttgtgaaatagagtttattatatttagttttttttgtttttaggtttgagttattttttttggttaaggtaagtaaatgtttatgatgtttggttgtgtataagataaagttataataaagttataatttattttttttttgtagaagattgtaaaaagtaaaagagatttaggtaaaaatttcggaatgatttttggaatagagagtttttttagaattagaagttaaaggaatttaaaatatagggaggtttagggtttttattgatataaaggaaagatgttttttttataggtttacgtttatattttttttttttttttatttttatttgtatttttatttttatatagggtttatgggattttttttataaaagagtagttgtagtaatttatattattttttacgtttggttgtttattaagaggcgaaaagtagttttatataggttttatttttggatagttttagttgtaaagtttaaaatatgcgaaggtaatttggaaaagtaagcggttgtatataaagtaaacgtttatagagttttggataaaattgagcgtttatgtgtatatggtaagtgtttttagtgtttgtgtgtttatttgtttgtttgggtgattttgtttttgagagtttggatgagaaatgtatggttaaaggtaattttagataggaagaaaggtagagaagagggtagaaatgatttttgatttttggggttgagggtttttagagtaaatggtataatgttacgaggttcgatttatttttatgacggaatttaaggttttagtaagtatttgttggtttggttatggtttgttttttagtttgtaggagatttttttatttttttatttgcgcgtttttattagttttgaaaagaatttttggtagttaggagtaggtatttttatcgttttttttttttttttttcgtttttattttgttggttttttagattgggttttggaattaaatttggtgagtgttggtttttaggaaatttggagttttggcgtttaaattttggtttaggaaagtaggagttatttaggaagtaggggttttttagggttagagttagttttttttgttttcgtttacgttgcgttagtatttgtttttttaaagttattaggtaggcgttagcgcgcggtgaggggaggggagaaaaggaaaggggaggggagggaaaaggaggtgggaaggtaaggaggtcggttcggtgggggcgggattcgattcgtaaattgttgtatttgttttttattttttagcgtttttttcgagatttcggggagttagtttgttgggagagcgggacggttcggagtaagtttagaggtagaggaggcgatagagggaaaaagggtcgagttagtcgttttagtgttgtataggagtcgaagggacgtattacgttagttttagttcggttttagcgatagttaacgttttttgtagcgcggcggtttcgaagtcgtcgttcggagttgttttttttttttcggtgaagtttttaaaagttgttaaagattcggaggaagtaaggaaagtgtttggtaggattgacggttgtttttgttttttttttttttatttcgtttttttttattttgttttttttttttttttcgttttttttttcgtag

SEQ ID NO: 614 - DNA, 2424 bp, Artificial Sequence
  chemically treated genomic DNA (Homo sapiens)
ttgcgggagagaagacgggggagggggggaaggtagggtggggggaggcggggtggagaggaggaggataaaggtagtcgttagttttattaggtattttttttgtttttttcgagtttttagtagtttttaaaaattttatcgaagaggaaagggtagtttcgggcggcggtttcgaagtcgtcgcgttgtaagaggcgttggttgtcgttggagtcgggttggggttggcgtggtgcgttttttcggtttttgtatagtattggagcggttagttcggttttttttttttttgtcgttttttttgtttttgggtttgtttcggatcgtttcgtttttttagtaagttggtttttcgggatttcggagggggcgttgggaggtggagagtaaatgtaatagtttgcgagtcgggtttcgtttttatcgggtcggtttttttgtttttttattttttttttttttttttttttttttttttttttttttttttttatcgcgcgttaacgtttgtttagtggttttggagaaataagtgttggcgtagcgtgggcgagggtaggagaggttagttttagttttggaggatttttgttttttgaatagtttttgtttttttaaattaaggtttaggcgttagggttttagattttttggaggttagtatttattaaatttggttttaaagtttaatttaaaaaattaatagggtggaggcgagggagggaggaaaaggacgataggaatatttgtttttggttgttaggggttttttttaggattgataagagcgcgtagatgggagagtgggagagttttttataaattgaggagtaagttatgattaagttagtagatatttgttgaaattttagatttcgttatagggatagatcgggtttcgtggtattgtgttatttgttttaggaatttttagttttaagaattagaggttatttttatttttttttttgtttttttttttgtttggaattgtttttaattatgtattttttatttagatttttaaaggtaaaattatttagataagtaggtaaatatataaatattaaaaatatttgttatgtatatataggcgtttaattttgtttagagttttgtaaacgtttgttttgtatgtagtcgtttgtttttttaagttgttttcgtatattttaaattttataattggaattatttaaggatagaatttatatagggttgtttttcgttttttgatggatagttaggcgtagaggatgatgtgggttattgtaattgtttttttgtggaggaggttttataagttttgtgtaaaggtggagatgtaagtgggaatggaaagagagagaaaatgtaaacgtaaatttataaggaaaatattttttttttatgttagtagagattttgggtttttttatgttttaaatttttttgatttttgattttggggaggttttttgttttaaaagttatttcgagatttttgtttgggttttttttgttttttgtagttttttatagagaaaagatgggttgtagttttgttgtagttttattttgtgtatagttaaatattataggtatttatttattttgattaaagaaggtaatttaaatttaaaggtaaggaagattggatatgataggttttattttatagatgaataggttgaaataaggatataatttgttttatgttttatattagtaaaatttaaattagttttttagtttattgttatttgagttagattttagatttattaatcgtattgttatttgggaaatggttataaatgaattttttagaatataaaggtttgaagatttttttatttgaggaggtgaaaaattattttttgagattttaatggttatagttttttttgaatatattttattatatgtaagtagaatgcgtagatattttaattttatttgaatatttattgtaatatttaattttattataatttttaattagtattgtttaataggaattgagtgggttggtaggatggtagaatggaattaatataggttttagagttaggagaattatgtgtttatatattaatagtgaaggaaggtgtaaaaattattgaatgaataatggataggagtgaagaggatatatagatataaagaggtttgaaaaaaaattaaggtgagaaataatgttttgaagttattttgaataaaaagtagtttgatatttaaatttgggtttgaaagattttaaagtttatgttgtttttatattattaatattgtttttatagtttttatatttgaaaattgttgttaatataagttatttttagaaggttagtgtgttatttaaaagatataatgtgtatagaataaatttgtaaataggaaagtattttataaatttgaaggattattatgttattttta

SEQ ID NO: 615 - DNA, 2479 bp, Artificial Sequence
  chemically treated genomic DNA (Homo sapiens)
taaaggagttttttttttttttatttttttggtattttttttgttttttttttgttatttttaggtggatttagatttaaggtttagatttgtaaggtaggaaaatgttgtaggtttaggttgggaaagggtttaaagtcgttagtggattgttgggatttagtttttttttttttattaagagagcgagttttattgggtttaaaatgattttaagttttggtttttgatattaggggaaagagatgggggtgatagaattatagaatttttgttatgtttttttaagtgtgtttagagatgcgtgtgtgtgtgtgtgtgtatatataaatgtttgtttatttttaggtaggaagggtggatgtagttatttatatatggtttgtttttttggaggataattttatttgataaataattgtttttatttgaatagaataaataaggttttatgatgaagtaaaatattaaatatatatgtattaaaaaatgtataattatttttttggaatgggttatatagagatgtgttttttaaaatgttaagagtgtaaaaggataaatagtgaaaaataaattttttttttattttgttttttagttttttaatttttttatttagaggtgagaatagaatttttatattttttagaatttttatagttagaattgtttatatgtttttattgtttttatttttatttttgtttgtataaataaatgaattgtttattatggaaattttttaaaagattcgttaatattttaataggaagtattaatagtttatgttttaggattttgtttttataattttgtaatattatattacgatatttaatttaatttttattaagttttgttaaaaacggattttaaattaagttgtaaatttttagtaatttggttttgtttttttttttttgatagtattattaaataaatttttttattgtcgaaagtaataagttcggttttgttttatttattggttgtgttggtgatatttggggattgttattgaatagacgtatagagggagtttttataggtaggggtttttttgtttgtgtttttgggagagtatgtttcgtatatttgtcgcgttgatgaagattttatagttttattagttgcgggtaagggggtttgaggtagttttaggtaagttggggtttagcggggagaagttgtagaagaattgattagaggattttaggaggttttagagttgggcgaggtagagagttttttgtgcgtttttttttttttttgtaattcggggattttttgtattggggtaggttttcggttaggtgtatgggaggaagtacggagaatttataagtttttcgattttttagtttagacgttgttgggtttttttcgttggagatcgcgttttttttaaatttttgtgagcgttgcggaagtacgcggggttcgggtcgttgagcgttgtaagataggggagggagtcgggcgggagagggaggggcggcgtcggggcgggttttgatatagagtaggcgtcgcgggtcgtagtatagtgcggagatcgtagtttcggagttcgggttagggtttatttgttttcgtagcgtcggttcgcgtttttttgtcgtagttatcggtgagtgtcgcggttttgagattttcgggtcggatgcgcggcggttttagttttcgagcgtttgtttttttcgttttgggttgttcgggttttttgggtttttcggcggttgtacggagttaaggcgtttcgtttcgggcgtttttcgcgggtgtcgatttaggttgttcggagttcggagtttagagaggagagagatagttggggagtttggttatcgcgggtattttttttgcgttgtagtcgttcgtttggtttgttttttcgttttttcgttttttgttttgattttttttttttttgtagagtcgtcgtttagcgtttcgatttcgttattatgagagttttgttggcgcgtttgtttttttgcgttttggtcgtgagcgattttaaagtgagtgcgtttttgttttgattgatgttgtttaaggatttttgattagtattaggggagaggaggggttgtttagggagttggggtttttcggattttatttatagtagggttagattttttttaggaaatgggatagggtggtagcggaggtttgagaattacgggggttggtattggttggtaagggaggaagaggtcgtcgggattgttttagtttgcgggtatttggtagatgaagtttgtttgggttaatttattttttttggttggaaatttatggttttttatttgagaattagatacgaatagggtgaggcgagagggagagggaagagtgggttttgggattggggttagtttatttttattttggagtttttggagtatgggatttttgatgaagttttttttcgaattttttttagggtagtaatgaattttattaagtt

SEQ ID NO: 616 - DNA, 2479 bp, Artificial Sequence
  chemically treated genomic DNA (Homo sapiens)
aatttgatgaagtttattgttgttttggaagagattcgggaggaggttttattaaaggttttatgttttagggattttagggtgagggtaaattggttttaattttaaaatttatttttttttttttttttcgttttattttgttcgtatttagtttttaaatggaagattatgggtttttagttaggagaaatggattgatttaagtaagttttatttattagatgttcgtaggttggggtagtttcggcggttttttttttttttgttagttagtgttaattttcgtggtttttaagttttcgttgttattttgttttattttttggggagagtttggttttgttgtggatggaattcggaggattttagttttttgagtagtttttttttttttttggtgttgattagaggtttttgggtagtattagttaaagtaagagcgtatttattttggagtcgtttacgattaggacgtagagaagtaggcgcgttagtagggtttttatggtggcgaggtcggggcgttagacggcggttttgtaaaggaaggagaagttagggtaagaggcggaggaacgggaaggtaggttaggcgggcgattgtagcgtaggggagatgttcgcggtgattaggttttttagttgttttttttttttttgggtttcggatttcgggtagtttggatcggtattcgcgggggacgttcgggacggggcgttttgatttcgtgtagtcgtcggggagtttagggagttcgggtagtttagggcgggggaggtagacgttcgggagttggggtcgtcgcgtattcggttcggggattttaggatcgcggtatttatcggtggttgcggtaggagggcgcgagtcggcgttgcggggataggtggattttggttcgggtttcggggttgcggttttcgtattgtgttgcgattcgcggcgtttgttttatattagggttcgtttcggcgtcgtttttttttttttcgttcggtttttttttttgttttgtagcgtttagcgattcggatttcgcgtgttttcgtaacgtttataaagatttgggggaagcgcgatttttagcggaggggatttaatagcgtttggattgaggaatcgagaggtttgtaaatttttcgtgtttttttttatgtatttggtcgggggtttgttttagtgtaaggagttttcgaattgtagagaggagagaaggcgtataggagattttttatttcgtttagttttgaagttttttggggttttttaattagtttttttgtaattttttttcgttgggttttaatttgtttaagattgttttagatttttttgttcgtagttgatggagttgtgaagtttttattaacgcgataaatgtacgagatatatttttttagaagtatagatagaaaaatttttgtttgtaggggttttttttgtgcgtttgtttagtggtagtttttagatattattaatataattagtggatggaataaagtcgggtttattgttttcggtagtaagggggtttgtttgatggtgttattagagggggaaaggtaaggttagattattgaaaatttgtagtttggtttaaagttcgtttttgatagggtttgataaggattgggttaggtgtcgtgatatgatgttataggattgtgggaataaagttttagggtataaattgttggtgttttttattgaagtgttaacgggttttttgggaagtttttataatgagtaatttatttatttgtgtaggtaagaataaaagtaaagataatggaaatatgtagatagttttaattgtggaggttttggagggtgtggaagttttgtttttatttttgagtagaggaattgggagattggaggataaaataagaggaagatttattttttattgtttgtttttttatatttttaatattttaaaaagtatatttttgtatagtttattttaaaaagataattatgtattttttaatgtatgtgtatttagtgttttattttattatagagttttgtttattttatttagatagaaataattgtttattaaataaaattgttttttagaaaaatagattatgtgtaaatgattgtatttattttttttgtttgaggataagtagatatttgtgtatatatatatatatatatacgtatttttgggtatatttggaggaatatagtagggattttgtgattttgttatttttattttttttttttagtgttaggaattagggtttggggttattttgaatttagtaggattcgtttttttagtgggaaggaggaggttgagttttagtaatttattagcggttttgggtttttttttagtttaggtttgtagtatttttttgttttgtaaatttggattttgggtttgggtttatttgagagtgatagaaggaaggtagggagagtgttaggaaggtaggaaggaggaaggtttttttg

SEQ ID NO: 617 - DNA, 2484 bp, Artificial Sequence
  chemically treated genomic DNA (Homo sapiens)
ggtagtttttggtattttggattgcgaattgaaagggatttttgaagatattaattcgaatataattttaaaaattttttagtttttattgtttttttgatgaattttgtataaagataggagtttttaggagatattttgtgaaagttatagtagaagggaagttgaagtttgaaaatatattatattttgttttttggtttttaaatttttttagttaaaaatttaggtaaaattattatatttaatatagtaattatttgtaaaattttagaatagtaaataaaggatataaagaaatgtatttttattttttttaaatcgaaaataagtaaaatattatagaattagattttgttttattatataggaattgtttggtaaagattttttttttttttttaaaggtgaaattttaggttgttgaatattgaatgggtaaagatttttataatgttgtatttaagtgagtattaatgattttatttattaataacgattattttttgggaataagaatttattaggaagtaatttttaaaattttataaaggatttaattggtttttataatatggttagtagttatatgtaaattttatttggaagattggggtgaaattaaggggttggtgaaggaatttaggaaaattaaaatattaaatttatttttaatagttgataatgttatgttttaagagaagaaaaagagtatattttgttatagtgtgtgagaaatttaatttttgtttttggatgatggtggtatgttattttttttaaagttaggtattagtgtgagtagtgttttagagaggtgaacgtgtagttgtgttagatatttatagttttatttttaaaagatatatgggaaaatagttaaaagtttttttataattgtattaatttgattaataggaaaataagtggaaaatgtagttttattaaagtagagtagaggtttttttttattaaatttttaggagggggaggggagaatatagaatggttagggggtattttttggaagtcgaagagagattaaatgatgatttttatatttttttcgttgtttaagtgttgaaattaatttagattttatttttttttttatgttaattttggatttttcgagtaatttggagtttatgttttaggttttttgaagattagaagtttaagaagatgggaatttttagaataataattaggggaaattgtttatttgaagggttaagggtagggggttgcgtttggtattttattgagatttcgtttattgaaaatattgtttttaacgaaattatttagtattttgttttatttgcgtggttgttttttttatagtggtgtaatttgtgttagttgattgtttttaggattgttgtaaattttttgatgagtagtatttagaaggggttttagtaaaaattatgcgttttaaatttttaaagtttcgtttgggagagaggttgatatttgtatatgaagtttgttttttggaaatagtaggaggacgtaggaggggcgaagtaatttcgggaagacgttttttttttttttttacggatttagtgtagtttttggtataagtaattttgttatcgggcggttttttttaattcgtgtgggggttgatattaatataagtagtcgttttttcgggtgcgagtgggattttaggttcgggatgtggtgggtgcggtgcgggagaggtattcgtcgttttttttattcggatgttagaggtaagttgttcgtgtgaattcgagcgaacgattggaggttggttgttgtaggtttatttttttaggatgtgggttttagggggcgttttgatgtgatttaatttcgatcgtgaaaataattgttaggggttggttggattgttgttggtttttttttttttggtggttttgtttggtttgggtttagtttgggaataaatttgttttatattaatatttttttttatatcgggcgtcgtcgttttaattgcgcgtggggggcgaggcgtttatttcgtataagaatagaggagcgggggagaagagacggtttcgttgtttattgggtaagcggagtttagtttcgttcgggagcgggtaggagagatagggtagtgatttttatttatattagaaaattttttttttcggcgattttgttgttaattcgagtcggttatagatagtttagtgagtttttaattataaggacgagagaaaagtacggtgtttttcgagtttttttcgttttttcggttttaattttcgtttaggttttaggtttttttttttgtgtggtttggatttttttttagttacgattttggtgggatttaaaaggaaggaggtggcggggtttacggaagaggatatttaggagttagggagaagggttagaaaacgaataatgtgattttagaggcggaatttcgattttttttattttttatttcggttttattcggagacgaaagtt

SEQ ID NO: 618 - DNA, 2484 bp, Artificial Sequence
  chemically treated genomic DNA (Homo sapiens)
agttttcgttttcgggtgaagtcggggtgggaaatagagggggtcggggtttcgtttttggagttatattattcgttttttagtttttttttttggtttttgggtattttttttcgtaggtttcgttatttttttttttttggattttattaaagtcgtagttgggagagagtttaggttatataaaggggaagatttggagtttgggcgggggttaggatcgagggggcggagaggattcgaggggtatcgtgtttttttttcgtttttgtaattaaggatttattggattgtttgtagtcgattcgagttggtagtaaaatcgtcggggggaggggttttttggtgtgagtgggggttattattttgttttttttgttcgttttcgagcggggttgggtttcgtttatttagtgagtagcgaggtcgttttttttttttcgtttttttgtttttgtgcggggtgggcgtttcgttttttacgcgtagttgaggcgacggcgttcgatgtagaaggaagtgttgatataaaataagtttgtttttaaattaaatttaaattaagtaaagttattaggaggggaaaaattaatagtaatttagttagtttttagtaattgtttttacggtcggaattaaattatattaaaacgttttttgaaatttatattttgaaggagtgaatttataatagttaatttttagtcgttcgttcgagtttatacgaataatttgtttttaatattcgagtgaagggggcggcgggtgtttttttcgtatcgtatttattatatttcggatttgggattttattcgtattcgaagaggcggttgtttatgttaatattagtttttatacgaattagaaaagatcgttcggtgatagaattgtttatgttaggaattatattgaattcgtaagggagggggaagaacgttttttcggggttatttcgttttttttgcgtttttttgttgtttttaaaagatagattttatgtgtaaatgttaattttttttttaaacgaagttttagaaatttggggcgtatggtttttattaaagttttttttaagtgttgtttattagaagatttataataattttaaagataattagttaatataagttatattattgtaaggaaaatagttacgtaaatagagtaaggtgttgggtgatttcgttagaaataatgtttttaatggacggggttttagtaaaatattaaacgtagttttttatttttggttttttaagtaaatagttttttttagttattgttttaaaaatttttatttttttgagtttttaatttttaggaaatttggagtataggttttaaattattcggggaatttagagttaatatgaaggagaaagtgggatttgaattagttttagtatttaaatagcgggggggatgtaagagttattatttaattttttttcggtttttagaaagtattttttggttattttgtgttttttttttttttttttgagggtttgatgaaaaggaatttttattttgttttggtgaaattgtattttttatttgtttttttattggttaaattggtgtagttatgggaggatttttgattgtttttttatgtgttttttaagaatggggttataaatgtttgatatagttatacgtttatttttttgggatattatttatattggtgtttaattttaagggaagtgatatattattattatttaaaaataaaaattgggttttttatatattgtagtagaatatattttttttttttttttgaggtatagtattgttagttattaaaaatggatttaatgttttaatttttttggatttttttattaattttttaattttattttaattttttagatagaatttatatgtgattattggttatgttgtagggattaattggattttttgtaaagttttaaaaattgttttttagtaaatttttatttttaagaagtagtcgttattagtaggtgaagttattagtgtttatttagatatagtattgtaaaaatttttatttatttaatgtttagtagtttgaaattttatttttaggaaaaaaagagggatttttgttagataatttttatataatggagtaaaatttgattttgtagtgttttgtttgttttcgatttaagggagatgaagatatatttttttatgttttttgtttattgttttgaagttttatagatggttattgtattggatataataattttgtttagatttttaattgagggggtttgagaattaagggataaaatgtaatgtgtttttaaattttagttttttttttgttgtaatttttataaagtattttttgaaaatttttgtttttgtataaaatttattaaagagatagtggagattggggaatttttgaggttgtattcggattggtgtttttaagggttttttttagttcgtagtttaaggtgttagggattatt

SEQ ID NO: 619 - DNA, 2487 bp, Artificial Sequence
  chemically treated genomic DNA (Homo sapiens)
atatcgtaattgtgggtttcggtttttacgtgtgtcgcgttggatattagtgttatggtttaaattttttatagttttttagttttttttgttgtggtttttagagttttggagagttagttgttttgttttgatttgggttattaggttttgtttttttacgaggtgcgtggggttaatatttatgttgggtttttagtttagaatgaaaatttatttttaaagaatttgttttaagaattcgatgaagtaagtattggttttttttttgtttttaatgtgtagcggcgttagtgtttagtagttttgattaagcggtttcgagtataagcggcgtttttatcgggaaagataggtatttggtagtcggtggttttttttatttcgttcgtattttttagtgattttttttttattaaaacggtattttgggagtcgcggagcgttacggtgatttttttaattgtttttggagtttaaattcgaatcggttcgcggttttgagtattattttatatattttagttttggttttttagagttttgtttttgcgtggttttttttcgtcgttgagttataatttttttttattttttttttttttcggcgttggttggtgcgggttggggttaggtggagaagtcgttttttgttaaggtgatagaacgtgttgggggtgggggtcggggttagggtcggtgtaattagggggtcgttgtttttttttggatatagtggaagtttttttcgtattattaaatttttgttattttttttgagggatttgtttttaggtagtacgtaagttgttgtttcgggtttatttcgtatttttttattgggtgaggaaggagtattttgaatggagatgggggtgttttcggtttatatatttgtagagaagaggtgtgtcgggttgtatttttggaggtcgcggtaattgatattagagaagatttcggttgtagttgggaaggtttattggttggaaagaggtgttttttttttttagtaaagggttttgtttggaagggttgttttttatttgtttagtggtattataggacggtcggtttttattcgaattttttcggacggtattattatatagtcgggttttcgtagtgttggttttttaattcgatgattgttatttcggtgaggatttgtgttgatggtcggagaattttgcgttgcgggcgtatatggttaggtggcgtttggtaggcgacgttcgggtgtaggacggcgtttttatcgttttattttaaatcgttgtttgggtttaggtttttcggttttttgaataggggtttggggggttaaggacgttgaggtttcgggggtaggaagttttttttggttaagcgttttttttttttttcggtatatatttttttatttatttatttcgtttattttcggggcgagaggtttattaaggtagggcgcgttttttttatgaattattttaaggtttttgagtcgcgggggtttcgggtaattatttttttttttttttggttttaggtattttagtttaggggtttgtagagaagttcgaagttcggataaacgcgtcggacgttaataattttttatttttggtagtagtaaaggttaatatatttttattttttattttagtttgttattaaaataaagttgcgcgcggttgagggtaggaaggcgttgagatcgagaagaagggacgtttcggagaaagtgcgtttagttgattttagaaattagagtttttcgggatttcgtcgagattttttgtagggcgttttaatttgtttttttattgcgtgtcggcgtcgtagcgcgtgcggtttagggtttggtgatttcggtttagttcggcggtcgcggcgaggtttttggcgtagtcgtttggaatttcgtattagaatcgggatcgcgtaaatgttttggttgaagtgttattttatttaagaaatattgttgttaggaataaaatggggttttcggtgtttcgaagtattttttgaaatttttttaaaataatttataaaaaatgtttttgttttaacgttttataacgtttaaggaaatatgtaaatggtttgtttttttatcgagatggtcgttttaattaatagtgtatatatatataataatttttttaatttttttttttagagttaagtattttattatatgtaaattataataaagaaaagattgtgtaagattatgtaagtcgattgatttaaaatattgagttttaatttaggttttttgtttttttatttaataatttttgtgtttggattagattggtgaagtaggttatggaaattaataaagtaaaaaattaaaagtattttttttcgttatttttttttttaaaattaaataatagtcgtttttttttgagtaggttttagttttaggttcgagtttttttgcgattattttatagttatttatagtagttgttgttgtttttgtcgggtttt

SEQ ID NO: 620 - DNA, 2487 bp, Artificial Sequence
  chemically treated genomic DNA (Homo sapiens)
aaaattcgatagaagtagtaatagttgttgtgggtgattgtggggtgatcgtaggaaaattcgagtttgggattgaagtttgtttaggaaggggcgattgttgtttaattttggagggagggatggcgaaggaagatgtttttaattttttattttgttaatttttatagtttgttttattagtttggtttaaatataaaagttgttaaatagaaaaatagagggtttggattaaaatttaatattttaagttaatcgatttgtatgattttgtataattttttttttattataatttatatatagtgaagtgtttagttttgaggaggaaagttggaagaattgttatgtatgtgtatattgttagttaggacgattatttcgataaagaaatagattatttatatgtttttttaaacgttgtaaaacgttaaagtaaaaatattttttgtaagttgttttaagaaaattttagaagatatttcggagtatcggggattttattttgtttttgatagtagtgttttttgaatagggtgatattttagttagggtatttgcgcggtttcgattttaatgcgaagttttaagcggttgcgttaggaatttcgtcgcgatcgtcgggttaagtcggagttattaagttttgagtcgtacgcgttgcgacgtcggtacgtagtaggaaaatagattaaaacgttttatagaaaatttcggcgaagtttcggaggattttggtttttaagattagttgggcgtatttttttcgggacgtttttttttttcggttttagcgtttttttgtttttagtcgcgcgtagttttgttttggtggtaaattgaaataagaaatggaaatatattggtttttgttgttgttagggatgagaggttgttgacgttcggcgcgtttgttcgggtttcgggtttttttgtagatttttggattggggtgtttgaggttaggagaggagggggatagttgttcggagttttcgcggtttagaggttttgggatgatttatggggggggcgcgttttgttttggtgagtttttcgtttcgagggtaggcgaggtgggtgggtaggggagtgtatgtcggagagaagagagaacgtttaattagagagaattttttgttttcggagttttagcgtttttagttttttaaatttttgtttaggaagtcgaaggatttaggtttaggtaacggtttggggtggggcggtaagagcgtcgttttgtattcggacgtcgtttgttaggcgttatttggttatgtgcgttcgtagcgtagggtttttcggttattagtataggtttttatcgaggtgatagttatcggattgggaaattaatattgcgaggattcggttatgtgatgatatcgttcgggggaattcgagtggaagtcgatcgttttgtggtgttattagataggtgagaagtagtttttttaaatagggttttttgttggaaggaggaggtatttttttttagttagtgagtttttttagttgtaatcggggttttttttaatattagttatcgcggtttttagaggtgtagttcggtatattttttttttgtagatgtataaatcggggatatttttatttttatttaagatgttttttttttatttagtagaggggtgcggagtaaattcgggataataatttgcgtgttgtttggaagtaggttttttagaaaggatgataaaaatttggtgatgcggaagaagtttttattgtgtttaggaaagggtagcggttttttagttgtatcggttttggtttcggtttttatttttagtacgttttgttattttaataaagagcggtttttttatttgattttaattcgtattagttagcgtcgaggaaagagaggaatggaagggagttgtggtttagcggcgaggaagagttacgtagaggtaaggttttgaggagttaaggttggggtgtgtagggtggtatttagggtcgcggatcggttcggatttggattttagaggtagttggaagggttatcgtggcgtttcgcggtttttagggtgtcgttttggtgaggagggggttattgggagatacgggcggggtaagaggggttatcggttgttaagtatttatttttttcggtgaaggcgtcgtttgtattcgggatcgtttggttaaggttgttgggtattggcgtcgttgtatattgggggtagagagggagttagtgtttgttttatcggatttttaaagtagattttttaagagtggatttttattttgaattggaggtttagtatggatgttggttttacgtatttcgtagagggataggatttggtgatttaggttagagtagaataattggttttttagggttttgaaggttataatagagaaggttgggaagttgtgggaggtttggattatgatattgatgtttagcgcggtatacgtggggatcggggtttatagttgcggtgt

SEQ ID NO: 621 - DNA, 2491 bp, Artificial Sequence
  chemically treated genomic DNA (Homo sapiens)
tttatttaaaaattttaagtttaggtcgggtatagtggtttacgtatgtaattttagtatttggagggatcgaggtgggcggattataaggttaggagattgagattattttggttagtatggtgaaatttcgtttttattaaaaatataaaatttagttgggtatgatggtacgtgtttgtagttttagttatttgggaggttgaggtaggagaatcgtttgaattcgggaggtggaggttgtagtgagcggagattgtattattgtattcgtttggtgatagagtaagattttattttaaaaaataaataaagaaaatttgaagtatagtatttttttaaattttaaatagataatagaaattggtttttttttatttaaattagaatttaagtttaattttatatatttttgatagtttggattttgttttttaattttataaaattgggaatttaagtattatttggttcgatttaaatgtaatgtagaatttgtattaaaatattatattaaagttttagatttgtagtagttaatagtatttttatgtatgtgttagggattgttttaaatattttatatatattaatttttttattttgtatttttgttttcgttttatatagtaggaaattgaaatattgagaggttaagtaattaaagttatagagttagagtgataggagtaaagttttaatttaggtaatttagatttttagagttttgatttttattattaagttgttagtatagtttttttggtaattatttttaatttaaatataattcgagtgatttatttaataagttattattttgataatttagtgatttgtaatgtaaaattatttattgtaatttatttaatattattgtttttttgtgttgtaaaaattatagtaatcgagatgtaatttattatttttttttttattttcggtattttgtgttaatttttttgttttgcggatttttttcgattttttattatgcgtgttaattgttattaatttttttgtttgttggggattggggtcgcgagggtatattttcgaggggtacggggttagggttaggtaggttgtgcggttgggcggggttttgtgttttattgcggagtgcgggtcgggaagcggagagagaagtagttgtgtaattcgttggatgcggattagggcgttttttattttcgtcgggagttcgtcgattggttgggtgtgggcgtacgtgatcgatatgtggttgtattggtgtagttcgttagggtgttattggagatagaatggaggtgttgtcggattcggaaatggggtaggtgttggagttattatggttaggtttgttgcggggggaggggggaaggtggttttttttcgtattgttttaaatcgatggtttttttttggtatagggtttattgtagtatgttaaacgaggaggtaggggcgtcgttttttcgttttttattgtagtattggagatggattttttgtatttcggatttagggtttttgatagaagaggaagaagggggaggggtagaagtgttaaggggagtttgttgagaaaagttgtttttgaagttagaaggggtttttgtttttataatgttatttgatagagtggaataatagtatttaaggaaacgggtagaggataataaagaatggagtatatttatggcgaggagtaaaagttttattttattgaaaggtttttttttttttttggcgataaggatatatgtattggtggttaaaagagagaggagataaaatcgttgtagatggttgatgtgaatttagtggaaagagttattggggatgagagaaagaggaggaggtaggtattgtagagcgtgagtggtggtgttggttggtgaaatattggttattagtagtgtgtttgtttttgtaaaatatttaagtaaattttttgtgaatagggtggtaaatagatattagtgtttttgttagttataaaatgtagtggtagtggttttttgcggacgattgtagtagtgttttttttttttttgttaggtcgaaaagataattgtagaggaataagaaattttgtagtaaatgttggggtagaagtttatttataagaagttatagtttataaatgtagtttgaatagtagaaaaaaaattattgttttttaaagtaggaataatgttaggttatgaatgttttgttattggaatgtattggatattttgattttatattacgaaagtgatgtttaaattttttgatttaatataaattttatacgaaattttaataaattatgtatgaaatagtggatttttttttttgttagtgaagtttttatgttattaattaggttatttaagagtaaattattttataacgtaaattattttgttaaaaattatggtgaataaatttttgtaggtttaatatttaagatttatagttaagtaattttatatttttttttggttgtttttagataata

SEQ ID NO: 622 - DNA, 2491 bp, Artificial Sequence
  chemically treated genomic DNA (Homo sapiens)
tgttatttaaaagtaattaaagagaaatataaaattatttaattataggttttaaatattaggtttataaaaatttgtttattataatttttgataaagtaatttacgttgtaaagtggtttgtttttgaatgatttaattaatggtataaaagttttattaataaaagaaaagatttattgttttatatataatttattaagatttcgtataggatttatgttaaattaaagaatttgagtattattttcgtgatgtagaattaaagtgtttaatatattttaatgataaaatatttatagtttgatattatttttattttaaaaaatagtaattttttttttgttgtttaggttgtatttataaattatggttttttgtaaatgggtttttattttagtatttgttgtaaggttttttatttttttgtagttgttttttcggtttaatagagggagaaaaagtattgttgtagtcgttcgtaaaaagttattattattgtattttgtaattaataaagatattggtatttgtttgttattttgtttatagggagtttatttagatgttttataaaagtaggtatattattggtgattagtattttattaattaatattattatttacgttttgtagtatttgttttttttttttttttttatttttagtagttttttttattagatttatattagttatttgtagcggttttgtttttttttttttttggttattaatgtatgtgtttttgtcgttagggaggaaaagaagttttttaatggggtagagtttttgtttttcgttatgaatatgttttattttttgttgttttttattcgtttttttagatattgttattttattttgttaaatggtattataaaaataaaaattttttttggttttaaaaatagttttttttagtagattttttttaatatttttatttttttttttttttttttttttgttaaaaattttggattcgaagtataggaaatttatttttagtgttgtagtggggggcggggggacgacgtttttgttttttcgtttggtatgttgtagtggattttgtgttaaggaaaggttatcggtttaagatagtgcgagggaaaattattttttttttttttttcgtagtaagtttggttatggtggttttagtatttattttattttcgagttcggtagtatttttattttgtttttagtgatattttggcgggttgtattaatatagttatatgtcggttacgtgcgtttatatttagttaatcggcgggttttcgacgggaatggggagcgttttggttcgtatttagcggattatatagttgttttttttttcgtttttcgattcgtatttcgtagtggggtatagggtttcgtttaatcgtatagtttgtttagttttagtttcgtatttttcgggggtatgttttcgcggttttagtttttagtaagtaaggaagttgatggtagttgatacgtatagtaaagagtcgggggaggttcgtagggtagaaggattagtataagatgtcggaggtgggagggagagtaataaattatatttcgattgttatgatttttgtagtatagagaaataataatattaaatgaattataatgaataattttatattataagttattgagttgttagagtgatgatttgttagatagattattcgaattatatttgaattaaaaatagttattagaaaagttatgttagtagtttagtagtggagattagaattttggaagtttgggttgtttgagttgaagttttatttttgttattttagttttgtaattttagttatttaattttttagtgttttaattttttgttgtataaaacgggaatagaagtatagaatagaggagttaatatatatgaagtatttagagtagtttttgatatatatatagaagtgttgttagttattataaatttgaggttttaatgtagtattttaatgtaaattttatattgtatttaaatcgaattaggtgatgtttaaatttttaattttatgaggttgaaggataaaatttaaattgttaagaatatataaagttaaatttaaattttggtttaaatggggggaaattagtttttattatttatttaaaatttaaaaggatattatattttaagttttttttgtttgttttttgagatagagttttgttttgttattaggcgagtgtagtggtgtaattttcgtttattgtaatttttatttttcgggtttaagcgatttttttgttttagttttttaagtagttgggattataggtacgtgttattatgtttagttaagttttgtatttttagtagagacggggttttattatgttggttaggatggttttaattttttgattttgtgattcgtttatttcggtttttttaagtattgggattatatgcgtgagttattgtgttcggtttaaatttaaagtttttaaatgaa

SEQ ID NO: 623 - DNA, 2425 bp, Artificial Sequence
  chemically treated genomic DNA (Homo sapiens)
gttttagaataatataaattaaagaattaatgataacgttttttatttttaaagattttagaagttgttttttgtaattagataatataaattttgaatttttttatatattgttgttaattttttgggtttttttttttttttaagaaagagaaagttatagaggagtgattgatcgggtaggtggtggtagttttagttttttttaatgtttttggttgtttttttttttttgtataaaattaaaattaataacgattaaattaatattaattaaggttttttcgtttttaattttttttagtgatttgtttttatttttggattttttttaagtatatttttgtcggtagtatttgttattattgacgtttttttattttttttttgcgtttttttaatggcgtaaatggatttagtttttaagtttttttttttataaaattttgtttttttttttttttagatatatttttggtatttttttttttataaggttttatttttttatatatattagtcggtgttttttgttttgttttgttttgttttgttttgagatagtttcgttttgtcgtttaggttggagtgtaatggcgcgatttcggtttattgtaattttcgtttttcgggttttagcgatttttttgttttagttttttgagtagttggagcggtattacgttcggttaatttttgtatttttagtagagacggagttttattacgttggttaggttggtttggaatttttgattttatgattagtcgacgtttttaaagatatagtgttttttttaaggtatattttagtttttattacgaggatttttttacggatatttagtgttttttttttgatttttagcgtttttttcgcgatttataaattgtttttttttttagggtttataacgttttacgttttttaggtttcgtttttatttttcgttaaagaatatttatttgttagtttcggaaatttatttttttacgttagtattttagagtattatttgggttttttgtttttttttcgggattttattatttttatttagagtagagggtgaaggttttttgagcgtaggggtttagttatttgagaaattttatagtttgtttttcgtttaggaagttttagcgagtttacgtcgcgtagtcgtagttttaatttatttgtaattttcgcgttttttcgttgttacggaaattaaggggttatcgttaagtagtagttttttagaatacgaaattaaggtataattagaggatgggagggatagaaagagttaagcgtttttcggggttttggattggttatttagtttgttttcggatgacgtaaaaggaaagagacggaagaggaagaattttatttgagtttgttataaagtgtttgttttttagtttttatttttttagttgcggtttattgtattatagtaattgttgtacgaaggttagaatcgttatttattgtttaaagtagtcgtaagaagaggttttaattttttatttttttcgttttaatggaggtttttagtttcggtaaatataagtaataaggattgttgggggggtggagggaaataattatttttagtatgcgttgcggaatgaaaggttttcgttatagtgttttttagaaattgtagttttatggagaggaatatttaatattagagcgggtataatttttacggaaatttagtggatagattggagatttgtgcgcgtttgtatttgttaatagttatggattggagtgttatgttttcgtattttgaaagtagaaattaggttttaaaaagatacgtataattttttagggagattataatttttatttagttttaggagtttggggtaagtagttttgtaaggttagtggtttgcggggacgtagtgagcgtcgaatttgtttggggtaggggaaatgcgttttggtttatgtttgcgtattcgtagttttattttttagttttagtgtttgttatttttcgggtttagtttgtttttgtttcgttttcgtcgacgtaatcgttattagttaatggggtggtcgttttgagggataagtggtaagagttaatttttttggcgaaaacgcggagaaacgggattagttattgtttttgttcgttatgttagatttattttatagagatagcggtagagttggtagcggacggtttttgtattgtcgtttttttagggggcgggaagttggtaaggaagtagtttgggttagttaggggtggggttacgttatattaagagggtttggagaagtttaagggaggaattttgtaaagaagaggggcgatttttttcgtgttttcggatagttaatcgttttagtgataggatgagagagtttttcgtgttttgagggatcgagtgggcgaaaagcgtcggagag

SEQ ID NO: 624 - DNA, 2425 bp, Artificial Sequence
  chemically treated genomic DNA (Homo sapiens)
tttttcggcgtttttcgtttattcggttttttagaatacgaagggtttttttattttgttattaaaacgattagttgttcggagatacggaaaaagtcgttttttttttttgtaggattttttttttgaatttttttaaatttttttagtgtgacgtgattttatttttagttaatttaggttgtttttttattagtttttcgttttttggggaggcggtaatgtaaagatcgttcgttgttagttttgtcgttatttttgtggggtgaatttaatatggcggataaagatagtaattagtttcgttttttcgcgttttcgttaagaagattggtttttattatttgttttttaaaacgattattttattgattggtggcgattgcgtcgacggagacggggtaaaagtaagttgaattcgaaaaataataaatattggggttgaggggtggaattacgagtgcgtagatatgggttagagcgtattttttttgttttaggtaaattcggcgtttattgcgttttcgtaggttattgattttataagattatttgttttagatttttggggttggatgggaattgtagtttttttaaagagttgtacgtatttttttaaggtttagtttttgtttttaaaatacgaaaatataatattttagtttataattgttgataagtataagcgcgtataggtttttaatttatttattggattttcgtgagaattgtgttcgttttggtattggatgtttttttttataagattatagtttttaaggaatattgtggcgaagattttttatttcgtaacgtatgttggaaataattatttttttttatttttttaataatttttattatttatatttatcgaaattggagatttttattagggcggaaagagtgggggattgggatttttttttacgattgttttggataataggtagcgattttgattttcgtatagtaattattgtgatgtaataagtcgtaattggaagagtagaggttagagggtaggtattttatggtaaatttaggtagaattttttttttttcgtttttttttttttacgttattcgggggtagattgggtggttaatttagagtttcgagagacgtttggttttttttgttttttttattttttgattgtattttgatttcgtattttgagaggttgttgtttagcggtagttttttggttttcgtggtaacggaaaagcgcgggaattatagataaattaaaattgcgattgcgcggcgtgagttcgttgagattttttggacgggggataggttgtggggttttttagataattgggtttttgcgtttaggaggtttttattttttgttttgggtaaaggtagtagagtttcgggaaagggatagggggtttaagtgatgttttggggtattggcgtgggagagtggattttcgaagttgatagatgggtattttttgacggggggtaggggcggaatttgagaggcgtaaggcgttgtgaattttggggaggggggtagtttgtaggtcgcgagggaagcgttgaggattaggaagggggtattgagtgttcgtgggggaattttcgtgataggaattggaatatgttttgagggggatattatgtttttaaaaacgtcggttggttatgaggttaggagttttagattagtttgattaacgtggtgaaatttcgtttttattaaaaatataaaaattagtcgggcgtggtgtcgttttagttatttaggaggttgaggtaggagaatcgttagaattcgggaggcggaggttgtagtgagtcgagatcgcgttattgtattttagtttgggcgatagagcgagattgttttaaaataaaataaaataaaataaaataaaaaatatcggttggtatgtatgagaggatgggattttgtggaagaagaggtgttaggaatatgtttgggaaggggaggagataggattttgtgggagggagaatttaagaattggatttatttgcgttattgagaaagcgtaagagggaagtagaggagcgttagtagtaatagatgttgtcggtagggatgtgtttgaggaggatttagagatgagagtaggttattgggaaaggttaggggcggggaggttttgattggtgttggtttggtcgttgttgattttggttttatgtaagaaaaagaaaataattagaaatattggagaaagttaaggttattattatttattcggttagttatttttttgtagtttttttttttttggagaaaggaaaagatttaaggggttggtagtaatatgtgaaaaaatttagaatttatgttgtttaattataaaaagtaatttttagaatttttaaaaataaaggacgttgttattagttttttggtttgtattattttaaaat

SEQ ID NO: 625 - DNA, 2452 bp, Artificial Sequence
  chemically treated genomic DNA (Homo sapiens)
agagatttttagattttgagtagtttgagatgttagtaattgtagttgttttaagtttgggttttgttttttagtgggatttttgtttagatgaataatttattttttgtaattttttaaaagtaaaattgtaaatgttttaggtatagaaaggaggtaaaggtgaagtttaggggaggttaggggtgtgaggtagatgggagcggatagatatattatttatttttgtgtttgttagaagaattagtagatatttttagaattgttttttatttatgttatttttataaattatttgtaaatgagggttatttggtatttttgttattttggagttatagaaataaaggatgataagtagagagtttcgggtaggaggtaaaagttttgtgttttaattatagttatttttttgttgtatgatttgagttaggttattagatttttttgagttttagtttttttagtagtgtatacgggttatgtggggagtatttaggagatagataatttattcgttaaatttttttttttttggttaataaagttgttgtaattatagggattttttttgtttaggtgagtgtagggtgtagggagattggtttaatgtttaatttttttgtttttttggagattaggttgtttttttttggtagtttttttaattttttttttttcggaagtatgtgataattaataattttgtatatttaagtttagtggattttaatttttttatttgtgaaataaacgggattgaaaaattattttggttttaagatgttttgttggggtgtttaggtgttttaggtgtttttgggagaggtgatttagtgagggattagtgggaatagaggtgatattgtggggtttttttggaaattgtagagaggtgtatcgtttttataatttatgaatttttatgtattaatgttatttttttgatttttttagttgtattgggtaaatttttgtttgttagagtgggttagcggtgagttagaaagggggtttattttaatagtgttgtgtttttttggagagtgttaatttattttttaagtaaaaaaagttagatttgtggtttatttcgtggggaaatgtgtttagcgtattaacgtaggcgagggattgggggaggagggaagtgtttttttgtagtacgcgaggtttcgggatcggttggtttgttggaattcggttaggtttagttggttcggcgttgggtagttaggagtttgggtttcggggagggcggtttcgggcggcgcggtgggtcgagcgcgggtttcgtttttttgaggcgggttcgggcggggcggttgtatattagggtcgcgttgagttgcgttagttgaggtgtgagtagttgtcgaagttagttttttgtggagtcggagttgggcgcggattcgtcgaggtatcgaggtatttagaggaggtgagagagcggcggtagataataggggatttcgggtcggcggtttagagtcgagttaagcgtgttcgcgtgtgtttttgcgtgttcgcgaggatgcgtgttcgcgggtgtgtgttgcgtttataggtgtttttgcggtaggtgaatgacgggcgtgggtcggtgcgcgttcggtttgcgtatacggtgtttttaagtgcgcgggtgacgagagtcgggatgtgtcggagatttcggggcggagagcgggattataagtataggaatttttggttacgtttttcgtttttggaaatttagttggggcgagggagggcgtggacgggatcgttttgggagttcgtttttggttgcggttggttttaggttttaggcgtagtttgttcgcggcgtggggatgaagttcgtgtttttggaggggtttaggaagggcgaggaaagcggagtggagtaagttcgtttaggatcggtttcgggtggttttgggatttaatttgcgtcgttttggtttaggttttaggtttaggttttttacgttattgtgtttattatttggttgagcgttgaggttagcgcgggttgttttttggtttttgggaatgtgttaggattcgttttttaaggattagcgaggaggtgatttattgtgataaggagattttagggaacggattgtatgaggttagaatttcgttcgggatggggtatagcgggattttagaagtttttttttttgttttttcgcggttttcgtttttttatcggtatagtgatttatttggttggaatagtttgtttttaaggaagtcgggtattggaggttcgggatatcgcgtcgggttttcgtttcgcggcgcgttgtaggggtcggggagttacggttttgttttgggcgggttttaattagtttgttagtcggggaagggtaagggttttttttattttttttttatcgcggtcgggagaatcgcggtttagtttgttttcgggtcggggcgttggatttcg

SEQ ID NO: 626 - DNA, 2452 bp, Artificial Sequence
  chemically treated genomic DNA (Homo sapiens)
cggagtttagcgtttcgattcgaggataggttgggtcgcgattttttcggtcgcggtgggaaagaggtagaggagatttttgttttttttcgattgataggttggttagagttcgtttagagtagggtcgtgatttttcgatttttatagcgcgtcgcggagcggggattcgacgcggtgtttcggatttttagtgttcggtttttttgggaataaattgttttagttaaataggttattgtgtcgatgggaggacggagatcgcgaaggggtaggggagagggtttttggagtttcgttgtattttatttcgggcggggttttgattttatatagttcgttttttggggtttttttgttatagtgagttattttttcgttagtttttaggggacgggttttggtatatttttaagggttaggaaatagttcgcgttgattttagcgtttagttaggtggtggatatagtggcgtaaaggatttgaatttgggatttgggttagggcggcgtagattggattttagagttattcgggatcgattttagacgaatttattttatttcgtttttttcgttttttttgggtttttttagggatacggattttatttttacgtcgcgagtaaattgcgtttggggtttggagttaatcgtagttaaaggcgagtttttagaacggtttcgtttacgttttttttcgttttagttgggtttttaggggcggggagcgtgattagggatttttgtatttgtaatttcgtttttcgtttcggggttttcggtatatttcgattttcgttattcgcgtatttagagatatcgtgtgcgtaagtcgagcgcgtatcgatttacgttcgttatttatttgtcgtagaaatatttgtgaacgtagtatatattcgcgaatacgtattttcgcggatacgtagggatatacgcgggtacgtttggttcggttttgggtcgtcggttcggggttttttgttgtttgtcgtcgtttttttattttttttgagtgtttcggtgtttcggcgaattcgcgtttagtttcggttttataaggaattgatttcggtagttgtttatattttagttggcgtagtttagcgcggttttgatatataatcgtttcgttcgggttcgttttaaggaggcgggattcgcgttcggtttatcgcgtcgttcgggatcgtttttttcggggtttaggtttttggttgtttagcgtcgagttagttgagtttggtcgagttttagtaggttagtcggtttcggaatttcgcgtgttgtaggagggtatttttttttttttttagtttttcgtttgcgttggtgcgttggatatatttttttacgaagtgagttataaatttggttttttttatttggagaatgagttggtattttttaggaggatatagtattgttagaatgagttttttttttggtttatcgttgatttattttggtaggtaaggatttatttaatgtagttgaaaagattaggaggatgatattaatatataaaaatttataaattataaaaacgatgtatttttttgtaatttttagaaaagttttataatattatttttatttttattgattttttattaggttattttttttagaagtatttggagtatttagatattttaataaagtattttgaggttagaatgattttttagtttcgtttattttatagatgaggaaattgaggtttattgaatttaagtatataaagttgttgattgttatatgttttcgggaaggagggaattggagagattattaaaaaagggtaatttgatttttagggaaatagaagaattggatattgaattaatttttttatattttatatttatttgaatagaagaaatttttgtggttgtagtagttttgttggttaggaaggggaggatttgacgagtgagttgtttgttttttgaatattttttatatagttcgtatatattgttggggaaattggggtttagagaagtttggtgatttaatttagattatgtagtaaagaaatgattatagttggaatataggatttttgttttttgttcggggttttttgtttgttattttttatttttgtggttttaaaatgataaaaatgttaaataatttttatttgtagatggtttatggagatgatataaataaaggataattttggaagtgtttattggtttttttgatagatatagaaatgagtgatgtgtttattcgtttttatttattttatatttttgattttttttggattttatttttgttttttttttgtgtttgaaatatttgtagttttgtttttaaaaaattgtagaggatggattgtttatttgaatagaaattttattaaaaaatagaatttaggtttggagtagttataattattgatattttaggttgtttagagtttggaaattttt

SEQ ID NO: 627 - DNA, 2353 bp, Artificial Sequence
  chemically treated genomic DNA (Homo sapiens)
tatagttggataatagaatttttaagaagtatttttttatatttttttatttatgattttttttttatttgttttattgatgtttaaaattttgtttttggagtttatttagtttatgattttgattttggttaatattaaaatatttaggatatgggggaggggaagttgttattaattttagtttagttagttaatatagcgagttgtttttatttattatttaataagtatttattgattgtatattgtatattaggtttgtattaagttttggtgttataaaaatgaatgaagtttggtatttatttttaatattgttgtagttatatataggagaatgtaagagattattatgaaataatgtagtaaatgtataatagggaattttagataagtatagtagagaagtaattagtttcgttttaggtttttttttgagattgattcggttggaagggagtaggtttcgttaaatgaagaagttgtgggaagataggaggataagaataggttttacgaagagattttagagtagagttgcgtatttttttttttttttgttttttttgttttgttatttaggttgaagtatagtggttagtttacggtttattgtagttttgattttttaggtttaagtgattttttcgttttagttttttaagtaattgggattataggtatgtattattatattaggttattgttttatattttttgtagagatggggttttattatgttgtttaggttggttttaaatttttgggtttaagtaattcgtttacgttaatttttttaaatgttgggattataggcgtgagttatcgcgttaggtttgagtaattttaattataggattttaaaaagaaattttttgcgttatttattaaataatattttttattaatttggtagtaaatattttgttaatagtatttaatttttaggtaggtattgtgtttatatatatatttatttttttttttttgattgtttttttgtttaatgggtagttattttttttggtatttagtagaatgagttgttgtagtttatataaaaagaatggagattagagtattttttgtgttattaacgtgtttgagaaatttgtagtgttattattattatatattatttttattttatcgaatattttatttttcggttttgcgtgggtcgagaggattgtcgtacgtatgtttgtacgtatgtatgtaatttatagtttttttttgttcgaatatgttggaggttttttggaagttgtgtagataatagtaattttagtttgaattattttttttaattgtggataagttgttaagaggtttgagtaggagaggagtgtcgtcgaggcggggcggggcggggcgtggagttgggttggtagtgggcgtggcggtgttgtttaggtgagttatcgttgtttttgtttagatacggtcgtttttatatttaggtttttgtgtttttcgtttgtttgttttttttttacgtattttttaggataattgtgattttaggtaagtaaggtggggtagtagggttggtgattttttttttttagggaaatttataaatatcgttatttgagttgatttgagatggtgaataaaatggatttaggtttattttggggttgtttttaaagacgggttgttgggttgagtattgtcgttttttattttttatgttggtagtatttttagtttttaattttttgagtattaggaatattgtagagggagtaaaattatttaattatataaggtaagaatatgaagaagttacgtggttcggaggttttggtggtagaggggtgtaatcgtgatttacggaggagaaaatatttttgaggatatttttaggtttattttggaatttagaatgaattttgtaatgttagttttagaaagggtgtggtattcgtaaattggggaaagttgagaagtattggtgggtttggttggtttttttttttggttgacgttgtaaggttgagatttaggtatatggattgtttttttttttggtatttttaagtattagatcgttgtttatttatttgtaattgtatttttttaagcggaaattattttttttttagttttttgggttttagtataattttaaataagttatatattttagatgtatatttttggatttataaattgtaatagttgtttgtagttttttatttatatgttgtatatttttttttatggttttatttaagtatattatattaaaaattaatatgttaggttattttagagatttgtaattagatttttagagttgggggtttttagatatattttagtttagtttttttattttgt

SEQ ID NO: 628 - DNA, 2353 bp, Artificial Sequence
  chemically treated genomic DNA (Homo sapiens)
atagaatgagggggttgggttgaaatatgtttaagagtttttagttttgaggatttggttataagtttttggaatagtttggtatgttggtttttagtatgatatgtttaaatgaagttataagaaaaagtgtatagtatatgagtaagaaattataagtagttattataatttataagtttaagaatatgtatttgaaatgtgtaatttgtttaaagttatgttgaaatttagaaaattgaagggagaataattttcgtttagaagaatgtagttgtaagtagatgaatagcgatttgatgtttaaaaatgttaaaaagaagggtagtttatatgtttaaattttagttttataacgttagttagggagaagagttagttagatttattaatattttttaattttttttagtttgcgggtattatattttttttgaaattagtattgtaaaatttattttgagttttaaagtaggtttgaaaatgtttttagaagtattttttttttcgtgaattacggttgtatttttttattattaaaattttcgagttacgtgatttttttatatttttattttgtatggttaagtgattttattttttttgtagtgtttttggtgtttaaagggttgggagttggaaatattgttaatatgggggatgagaggcgatagtatttaatttaatagttcgtttttgaaaatagttttaaaatggatttaagtttattttgtttattattttaaattagtttaaataacgatatttatgaatttttttgaaaaaaggaagttattagttttgttattttattttgtttatttggagttatagttattttggaaaatgcgtggaaaaggaataggtaagcgaggagtataaagatttggatgtggaggcgatcgtgtttgggtagaagtagcggtggtttatttgggtagtatcgttacgtttattgttagtttagttttacgtttcgtttcgtttcgtttcggcggtattttttttttatttaagttttttggtagtttgtttataattgaaagaaatgatttaggttgaagttattgttgtttgtatagtttttaaaaggtttttaatatgttcgggtaggaaggggttgtgagttatatgtatacgtatagatatgcgtacggtaattttttcggtttacgtaggatcggaaggtgaaatattcgatgaaataaaagtaatgtgtgatgatagtaatattataaattttttagatacgttggtggtataaaaagtattttgatttttattttttttgtgtaaattgtagtagtttattttgttagatgttaagagaggtagttgtttattaaatagaaagataattaaaaaagaaggaatggatatatgtataaatatagtgtttatttaaaaattaggtattattagtaaaatatttattattaaattggtaggagatattgtttaatgggtggcgtaggaagtttttttttaaaattttgtgattaggattatttaggtttggcgcggtggtttacgtttgtaattttagtatttggggaggttgacgtgagcggattgtttgagtttaggagtttgagattaatttgggtaatatggtgagattttatttttataaaaaatgtaaaataatagtttagtgtggtgatgtatgtttgtggttttagttatttggaaagttgagacgagaggattatttgagtttgggaggttaaagttgtagtgagtcgtgagttaattattgtattttagtttgggtgatagagtaaaagaaataaaaagaaaaaggagtacgtagttttgttttgaaattttttcgtggagtttgtttttgtttttttgtttttttatagtttttttatttggcgggatttatttttttttagtcgaattagttttaggaaaggatttgaaacggagttggttgtttttttgttgtgtttatttagaattttttattgtatatttattatattgttttataataattttttatatttttttatatgtgattataataatgttaaaggtaagtgttaaattttatttatttttataatattaaagtttggtatagatttgatgtatagtatgtagttaataagtgtttgttgagtaatgaataagagtaattcgttatattaattgattaaattaagattgataatagtttttttttttttatgttttgggtattttaatgttaattagaattaaagttataaattaagtgaattttaaaaatagaattttaggtattagtggagtaagtggagggaaggttataggtgaggaggtgtggaaggatgttttttaaaaattttattatttagttgta

SEQ ID NO: 629 - DNA, 2489 bp, Artificial Sequence
  chemically treated genomic DNA (Homo sapiens)
ttagatagagagtagtttgagttaggtaggaaagtgggatagtcggggagttggattttattttttgtgagtttcgttggtatttgatggtatgtggtttggagagggtaggtgatttggcgtggagggttagagggtaaatttttaaataagtggtaataggttattaatttgaaagggaaaattgtgtagtgatgggaaatgtgtttaataaatttattgggtgattaattataaaggttgggttggagttttagaggttgtttgttaaatattttattaagcggtattttgaaagttgttatttgcgtattttgggagtttagaggggattttgagggggaatgaggtttggaggatggaattatttttaggtagattgagaaggagtttggattttatttttaaatatagtttggagtttataggttagaggttttaatgggagaaaagttaaaggaagagggtgtagaaaggagttttagggaattggtggttatgtgattttgagtaaattttatttttttttgagatttagtgtttttatttttatggttttgtgtgtgttatagagatatggtggggattaaattcgatcgtgaatatgaaagtgtttgggaaattttatggttttatttaaatatgagttatttttatttgaattaaggggggaagttatttggtaggattaggaattttatttttttgaatttttatgggttttgtcgaggttgaagtagttaggggttaaagtcgtttttagtttttggaagggtattgtgaaagtggatttgatttgagaagtcgttttttgatgtgggtagttatgtgatgttagtttcgaataagagggggtagtttggagtttggaaaggtgttagtgtaggtggggtttacgtttagattttttttgttgattgttttgatgatttatttttatattttagtttttttatttttattgtagagtcggaaagggtgtggggaagagaggagagggaggtaggttttgggttttggtttcgttttttgtttttttttatttttttttgggtttggttatttagttaaaaggtaggttaagagtaggagagatatagagttcggtattggttttaggtagtagttagttcgtcgttcgtttgtgtgtttttagagttatggagagagttagtttgatttagaaggttaagttggtagagtaggtcgaacgttatgaggatatggtagtttttatgaaaggcgtcgtggagaagggcgaggagtttttttgcgaagagcgaaatttgtttttagtagtttataagaacgtggtgggcggttagagggttgtttggagggtgttgtttagtattgagtagaaaagtaacgaggagggttcggaggagaaggggttcgaggtgcgtgagtatcgggagaaggtggagattgagttttagggcgtgtgcgatatcgtgttgggtttgttggatagttattttattaaggaggtcggggacgtcgagagtcgggttttttatttgaagatgaagggtgattattatcgttatttggtcgaggtggttatcggtgacgataagaagcgtattattgatttagttcggttagtttattaggaggttatggatattagtaagaaggagatgtcgtttattaattttattcgtttgggtttggttttgaattttttcgttttttattacgagatcgttaatagtttcgaggaggttatttttttggttaagattattttcgacgaggttatggttgatttgtatatttttagcgaggatttttataaagatagtatttttattatgtagttgttgcgagataatttgatattgtggacggtcgataacgtcggggaagaggggggcgaggttttttaggagttttagagttgagtgttgttcgttatcgtttcgttttgttttttttagttttttattttgtcgagaggattagtatggggtgggaggttttattttttttttttaggcgttgtttttgttttaaagggtttcgtggagagggattggtagagttgaggttatttggggttggggattttattttttttgtagttgttgagcgtatttaattattggttatgtttttatttttgtttttcgtattcgttttttttcgattttaggattaggttattttttttttttttttgttttttttttgtttttgttgtttttgatcgtaggaattgaggagtgtttcgttttgtggttgagaattggatagtggtaggggttggagatgggtgtgtgtgtgtgtgtgtgtgtgtgtgtgtgtgtgcgcgcgcgttagtgtaagatcgagattgagggaaagtatgtttgttgggtgtgattatgtttttttttaataaagtttttttgtgatattttttttgttttttttttagtttttggcgatgggttgggagtgggattggaatttgatttagagattttgattttggatttttgagt

SEQ ID NO: 630 - DNA, 2489 bp, Artificial Sequence
  chemically treated genomic DNA (Homo sapiens)
atttagaggtttaaagttagggtttttaagttagattttagttttatttttagtttatcgttaagaattggaagagagataggaggagtgttataggggaattttattgagaggaaatatggttatatttagtagatatgtttttttttaatttcggttttgtattggcgcgcgcgtatatatatatatatatatatatatatatatatatttatttttagtttttgttattgtttagtttttagttataaggcgggatattttttaatttttacgattagaggtagtaggggtaggagggaggtaagaggaggggagaagtagtttggttttggggtcgggaggaagcgggtgcggagagtaggggtgggggtatgattagtggttaggtgcgtttaatagttgtaagaagagtgggatttttagttttaggtggttttagttttgttagtttttttttacggagttttttggagtaagaatagcgtttaggggagaagggtggggttttttattttatattagttttttcggtagggtgggggattggagggggtagggcggggcggtggcgggtaatatttagttttggggtttttggggagtttcgtttttttttttttcggcgttgtcggtcgtttatagtgttaggttgtttcgtagtagttgtatgatgagggtgttgtttttgtaggagttttcgttgagggtgtgtagattagttatggtttcgtcgaaagtggttttggttagagagatggttttttcggggttgttggcgatttcgtagtggaagacggaaaagtttagggttaggtttaggcggatggggttggtgggcggtattttttttttgttgatgtttatggttttttggtaggttgatcgggttgagttaatgatgcgttttttgtcgttatcggtggttatttcggttaggtagcggtagtagttattttttatttttaggtagaagattcggttttcggcgttttcggtttttttgatgaggtggttgtttagtaggtttagtacggtgtcgtatacgttttggagtttagtttttattttttttcggtatttacgtatttcgggttttttttttttcgagtttttttcgttgtttttttgtttaatattggatagtattttttaggtagttttttggtcgtttattacgtttttataggttattgagagtaggtttcgtttttcgtaggagagtttttcgtttttttttacggcgttttttatgaaggttgttatgtttttatagcgttcggtttgttttgttagtttggttttttggattagattggttttttttatggttttggggatatataggcgggcggcgggttaattgttgtttgggattaatgtcggattttgtgttttttttgtttttggtttgttttttggttgggtggttaggtttagagaagggtggggaggagtagggggcgggattagggtttaagatttgtttttttttttttttttttttatatttttttcggttttgtagtaaaggtaaaaaggttgggatgtgggggtgaattattagaatagttagtaggagaaatttgggcgtgggttttatttgtattggtatttttttaggttttaggttgtttttttttgttcggggttggtattatatggttgtttatattaggaaacggttttttaaattagatttatttttatagtgtttttttaggggttaaggacggttttagtttttggttgttttagtttcgatagagtttataaaggtttaggaggatggggtttttaattttgttaggtaatttttttttttggtttaggtgaggataatttatgtttaggtagggttatggagttttttaagtatttttatatttacgatcgaatttaatttttattatgtttttgtgatatatataggattatagagatgggaatattaagttttagagaggggtgagatttgtttaaagttatatagttattaattttttgaaatttttttttgtattttttttttttagttttttttttattgaggtttttgatttatgagttttagattgtgtttggaagtgagatttaggtttttttttagtttatttgaagatggttttattttttaggttttatttttttttagggttttttttgagtttttagaatgcgtaggtggtagtttttagagtgtcgtttaatgaagtgtttaataagtagtttttgaagttttagtttagtttttgtaattagttatttagtaggtttgttggatatattttttattattatataatttttttttttaagttggtggtttgttgttatttgtttgaggatttattttttggttttttacgttaggttatttgttttttttaagttatatgttattaggtattagcggggtttatagagggtggggtttagtttttcggttgttttatttttttgtttgatttagattgttttttgtttga

SEQ ID NO: 631 - DNA, 2407 bp, Artificial Sequence
  chemically treated genomic DNA (Homo sapiens)
ttatttatttttttaatatatattaattgttgtttttatgttttaggttttgtgttagatgttagaaatatatttttatttattggattttggtatggtttattgtttagtgttttgttatgttacgtgttatataatgtatttatttcggtatttagtttatggaaaataatgttgaaagatattgtatgtatgtttttataataaaattatgtaatttatgttttttttattgttttggttattaggaagtttttatttaaattagagtaaatatattagaatttgggtttgttattttagtttgttgaatttttttttttggtttagattttttattttggtttataaattttattgtataaatgttttttattgtaaaatattttaaattttttttaagggaaggttgtatggaaatgatatagtaaggttttttttgtatttttttagatttttattagggaaggtagatttagatgttttttttatttttagttttaaagttttttatttataaaattttttaagtagtgattattgttgttttgagtatttggaggtagtttagagtttttgaaaggtaatatttatatataaaaagaagtttttttcgatttagattttagttttggtgttagatgtatatttgaggagtaggtggttagttagatttttatttgagtagttaataaaatttattgttttttaatggaattttttttgtaagttcgaattgatttgttatttttgtgatttgtgagatggtagggaagtattaaatattattatgatttgggttatagtggggggaaaaaaggaaaaaagaaaaaaaaaatttattgttaagttttgttaggcgtagaaagggttggaattgttggggttattttatttgatttattggaaatagagtggattttattaatattttaataaagagaatttttttgtattaggttggaagtggtcgttagtttttcgtgtaattttattttttggaaaagtggaattagttggtattgtttagcgtgatttgtgaggttgagttttaatagtttaaagaagtaaatgggatgttattttcgcggggttcgtttttcgcgaggtgtttatttcgtatttgttatgtaaaacgagggagcgttaggaaggaattcgttttgtaaagttattggttttggttattagtttttatttaatgttttcgtgatgttgttgttgatttatttgggaagttggttggttggcgaggtagagtttttttttaaagtttggtttttacggaaaatatgtttagtgtagtcgcgtgtatgaatgaaaacgtcgtcgggcgtttttagtcggataaaatgtagtcgagaatttcgttcgttttgtgcgtttttttgttttaggtagggaagaggggttgtcgggcgcgttttgcgtttcgtttttgtattcggatcgttcggtacgggtagggtgagggggttttcggggggtcggggttttcggtcgcggcggcgaagatagatcggggttcggtagggaggttatttcgagtttagagattttaggtattttttatatataggtttttattttggcgtgcgtgtgtgtgtgtgtgtgtgtgtgtgtgtgtgtgtgtgtgtgtgtacgttcgttaacgggaggaggagagagtttttagtttttttttgttagtaggggcgatattttcgtttatattaagtggggtaattttggttttttttttcggaggttcggtgtattggagaaagatttagttagaggcgattttaacgagtcgcggttttttttagtttaacgtttagcggtcgaagcgttgttcgggttcggattgcgggatgcggggttggagaggtcgagtaggtattatcgattttttagggcgttcgggttttttggtatagttcggttgttcgttggaaggcgtttcggggtagtagagagttttagttcggttgttgttgtcgtttaaaggcgtcggcgtcggtcgtattcgtatcggggtttttttgtttttagatttcgggttcgaaagggtcggagcgtgtttttcgttagggcgtaggttttagtttttcgtatttttattgtttagttagttggagtttcggttagatttcgggttgtcgtttttgttgttttttttgagcgggagcggagcgtagagaaaagtttaagttttgtttattcgggttgtagttgtttgttaatttttagagcgttacggcgcgagggaagggtacgttaattaggagagggggcgagggagatgcggttcgtttgtagttatttttgtattttagagatttcgggaagtttgagtgtaggaaagtagcgtttcgaggttaggtttggggtgttggtcgttgcggggggtacgttttgcgttgtt

SEQ ID NO: 632 - DNA, 2407 bp, Artificial Sequence
  chemically treated genomic DNA (Homo sapiens)
agtagcgtagggcgtgtttttcgtagcggttagtattttaggtttggtttcggagcgttgtttttttgtatttaaatttttcgaaatttttgaggtgtagaggtgattgtaggcggatcgtatttttttcgtttttttttttggttggcgtgtttttttttcgcgtcgtggcgttttgagggttaataagtagttgtagttcgggtgggtaaggtttgaatttttttttgcgtttcgttttcgtttagggaaggtagtagaggcggtagttcgggatttggtcggagttttagttggttggataataggggtgcggggggttggggtttgcgttttggcgggggatacgtttcggttttttcgggttcggggtttgggagtaaaaggatttcgatgcgggtgcggtcggcgtcggcgtttttgagcgatagtagtagtcgggttgaggttttttgttgtttcgaggcgttttttagcgggtagtcgggttgtattagggggttcgggcgttttgggaagtcggtggtgtttgttcggtttttttagtttcgtatttcgtaattcggattcgagtagcgtttcggtcgttgggcgttgggttggggaaaatcgcggttcgttggagtcgtttttaattgagtttttttttaatgtatcgagttttcggaggagggaattaaagttattttatttgatgtgggcgagaatgtcgtttttgttagtaaaaaaggattgggagttttttttttttttcgttaacgaacgtatatatatatatatatatatatatatatatatatatatatatacgtacgttagagtgggagtttgtgtgtggggggtgtttaggatttttgggttcggaatgatttttttatcgagtttcgatttgttttcgtcgtcgcgatcggaggtttcgatttttcgaaagtttttttattttgttcgtgtcgggcgattcgaatgtagaaacggggcgtagagcgcgttcggtagttttttttttttatttgggataggagaacgtatagaacgagcggagttttcggttgtattttgttcgattagaagcgttcggcggcgtttttatttatgtacgcggttgtattgagtatatttttcgtgggagttaggttttgaggagaggttttgtttcgttagttagttaattttttaaatagattagtagtagtattacgaaagtattgggtagaggttgatgattaggattaatggttttataagacggatttttttttaacgttttttcgttttgtatggtagatacggggtgagtatttcgcgaggagcgagtttcgcggaggtggtattttatttgtttttttggattgttggggtttagttttataaattacgttgggtaatgttagttgattttatttttttagagaatggaattgtacgggggattggcggttatttttagtttagtgtaaaaagattttttttattaaaatgttaataagatttattttatttttaataaattagataaaatggttttagtagttttagttttttttacgtttggtaaggtttggtagtggatttttttttttttttttttttttttttttttattgtggtttaagttatgatggtgtttggtgtttttttgttattttataaattataaagatgatagattaattcgagtttgtagaaaaaattttattaaggggtaatagattttattaattgtttaggtgagagtttgattagttatttattttttaaatgtgtatttggtattaaagttgggatttggatcggaaggaatttttttttgtatatggatgttattttttagaagttttgaattatttttaggtatttagaatagtagtagttattgtttaagggattttataaatggggggttttgggattgagggtaagagggatatttaggtttgttttttttaataggaatttaagaaaatgtagggaagattttattgtattatttttatgtagtttttttttagaaagaatttaaggtgttttataataaaggatatttgtgtaatagaatttatgaattaaaatagaaaatttgggttagaaggaaaagtttagtaaattgaaatgataagtttaaattttaatgtatttgttttgatttggataagagttttttgatagttaaagtaataaaagaaatataagttatatagttttgttgtagaaatatgtatataatgttttttagtattattttttatgggttaaatatcggaataaatgtattatgtaatacgtaatatagtaggatattgagtaatggattatgttaagatttagtggatggggatgtatttttagtatttggtatagggtttggaatatggagatagtaattagtgtgtgttaaagaaatagatgg

SEQ ID NO: 633 - DNA, 2436 bp, Artificial Sequence
  chemically treated genomic DNA (Homo sapiens)
gtgaatttttatttttattaaaaatataaaaattagtcgggggtggtggtgggtgtttgtagttttagttattcgggaggttgaggtaggagaattatttgaatttaggaggtggaggttgtagtgagttaagatcgtattattgtattgttgtttgggtaacgtatcgagatttcgttttaaaaaaaaaaaaaaaatgagagaataggggagggtttagggtttagagttttggagaatagattttagtagtattaatattttaggattaatgttataaagatacgggttataattaaattggagaatatggttaaggatgggaatttagtttgagtagggttgagtcgagtagggttaagttaagtagggttgagttagaatattttttttttttttttgaataatttatttatattttagttatagggttggttttatttagttcggcgggagggaggagagggttggtttgtgattttagtgttgaggtttgattaaggtaaagggaaattttttatttttagattttttgtaagaaagaatggtatattatttgttatcgataggggttattattattaaatggagttagtataaatgttttttaataaagtatgtttagcgttcgggttttagtttgtacgtttatgaattgtttgttatattttttttttgaatggttggaaattgggtatttgtttttttaaataggaaatattttttgttcgagtgagttatttttgttttgttttaggagtaaagtttattttgtagttttttttgtggtgaagttttttttttttttcggagattagattttgtttttttgttggagggaagtgtttttataggtttttttttttttattttttgtgtttttttttaagttttgttgaatttgttagttaatttaataggaagtgaggttatggagggaggtagaagagttagggtggttattgaaagtaaaagaaatttttttttgggagttttttttatttttttttttgttgagtacgtggagttaggtaggttaggggattcggagattgcgatggtgttaggaaagggtggagcgggtgagtgtttgttgttaaggtggtttttttaataggaaattataatatttttgttttttgatttgttttagaaatagggttgtgggggtggggaagtaatttggatttgtttttttgaggatatttttgggtgttgtttggtttaggttttttgtgtggtttttttttgagtcgttgtttttgattttgttatttttttattttgagtagtttttagtttttttgttatttttttgttttttaagtttttttgtcgtttcgaatgtagatatacggttttttttttgtggattcgtttggagagtttagaagattttattaatttattttttttttttttttatttggttttggggtcgacggttaagtattttattttgttattttgtcgaattacgatgttttgaggtgtatagttttttttttttttttcgtgtttgaagggtttttttttatttttttatttttatttttgtttttttgtttttttttttgttttttaaagatagttttttaatgttttgatgtggattcgtgaatttatttgtatttttgtaaaatgtattttttttttgtatgtgtatattgttttttaattatgcgattttaggtaagtaatttttttgtgtttttgttattttattattaaatgattaataatgtttttagaggtgattgtgaggtttgaaggagataatacgtatatattatttattatacgagttagtaattattattgtatattaatattattggtattttattttgtttattttgtttttattttttttttatttatttattttttgagataaagttttgttttgttatttaggttgtagtgtagtggtgtaattacggtttattgtagttttaatattttgggattaagtaatttttttattttagtttttagattagttgggattataggcgcgtgttattatatttggttaattaaaaaatttttttttatagagatggtgttttattttgttgtttaggttggttttaaatttttatgtttaagggatttttttattttggttttttaaagtgttaggattatatgtatgagttacggtggttatttaggtattgatattatgaggttattttgatttagttttttttggtgaagagttttttttagatatttcgtttagtttttttagttatgagtttttattttttgaaagtttatattttatttggggaaagataaaaggtagttttaaagaagagaggtgtttgattttttttttttatttttaatattagaaaatattttatttaatttttagtatgaaggtaatattttgtttattggtatatttttagagtttaatatggt

SEQ ID NO: 634 - DNA, 2436 bp, Artificial Sequence
  chemically treated genomic DNA (Homo sapiens)
attatgttgggttttagggatatattagtaaataaaatattgtttttatattgagagttagatgaaatgttttttgatattaaaagtaggaaaagaaaattaaatattttttttttttgaaattgttttttgtttttttttaaatagaatataagtttttagagggtagggatttatagttgagaagattgaacgaagtatttgaaaaggattttttattagagagggttaggttaagatggttttataatattaatgtttggatggttatcgtggtttatgtatgtaattttagtattttgagaggttaaggtgggaggattttttgagtataggagtttgagattagtttgggtaataaaatgagatattatttttatgaagaaaaattttttaattagttaggtgtggtagtacgcgtttgtggttttagttaatttgaaggttgagatgggaaaattgtttgattttaggatgttgaggttgtagtgagtcgtgattgtattattgtattgtagtttgggtgatagagtaagattttgttttaaaaaataaataaataaaaaagaaatagaaatagaatgagtaaaataaaatattaatagtattaatatgtaataataattgttaattcgtgtagtaagtgatgtatgcgtattattttttttaagttttatagttatttttggaggtattattaattatttaatgatgagataatagaggtatagaggaattatttgtttgagatcgtatagttaaaaaatagtgtatatatataaaagaaaaatatattttgtaaagatatagataaatttacgaatttatattaaaatattagagaattgtttttggggaataagagagagggtaggagggtaagggtgggggtggagagataaaaggaaattttttagatacggaagagggggaaggggttgtgtattttagggtatcgtgattcgatagaatgatagaataaagtatttaatcgtcggttttagggttaaatgaaaaagaaaaaaaagtggattgataaagttttttggattttttaaacgggtttataggagggagatcgtgtatttgtattcgaggcggtagggaagtttggaggataaaaaggtagtagaggaattggagattgtttagagtgaaaaagtagtaaagttagaggtaacggtttagagagaaattatataggagatttgggttaggtagtatttagaggtgtttttagaagggtagatttaagttgtttttttatttttatagttttgtttttagagtaagttaagaaataaaaatattgtggttttttgttgaagaggttattttggtaataggtatttattcgttttatttttttttggtattatcgtagttttcgagttttttaatttgtttaattttacgtgtttagtagggaagggggtgggaaaggtttttaggaagaagttttttttatttttaataattattttggtttttttgtttttttttatggttttattttttgttgagttgattagtaaatttagtagggtttgaaaaaaaatataaaagataaaaggaggagaatttgtgaaaatatttttttttagtagaaaggtagaatttggttttcgagagaaagagaaaattttattatagaaggaattgtagggtaaattttatttttaaagtagaatagagatgatttattcgaataagaaatgttttttgtttaaaggaatagatgtttaatttttaattatttagaagagggatgtggtagataatttatggacgtgtaaattaaagttcgagcgttggatatgttttattggaaagtatttatattgattttatttagtaataataatttttgtcggtggtaagtaatatgttatttttttttgtaaagggtttgggaataggaagtttttttttgttttgattaaattttagtattgaagttatagattagtttttttttttttttcgtcggattgggtaaagttagttttgtagttgaaatgtaggtagattgtttagaaaaaaggaggaagtgttttggtttagttttatttggtttagttttgttcggtttagttttgtttaggttgagtttttatttttggttatgttttttagtttagttgtaattcgtgtttttgtagtattgattttggagtgttggtgttattgaggtttgttttttaaagttttgagttttagatttttttttgtttttttattttttttttttttttgagacggagtttcggtgcgttgtttaggtaatagtatagtggtgcgattttgatttattgtaatttttattttttgagtttaggtgatttttttgttttagtttttcgagtagttgggattataggtatttattattattttcggttaatttttgtatttttaatagagatggggatttat

SEQ ID NO: 635 - DNA, 2481 bp, Artificial Sequence
  chemically treated genomic DNA (Homo sapiens)
atatgattagttttattttagaggtgaggagtttaaggtttagagaagtggggggatttggttaatgatatatagttagtgtatggggaagttaggattgaaagtcggtttgatttagagttgggttgggtgttttttaagaaaggagatttttggtttggtttttttaaaattatttttaggatgggaacggtggtttatatttgtaattttagtattttgagaggttaaggtaggaggatcgtttgagtttaggagtttaagatttgttcggttaatatagtgagatttatatttttattaaataaaaataaaaataaaaataaaatataattagttgggtgtgatggtatgtatttgtagttttagttattagggaggttgaggtggggaggtgggaggattacgtgagttcgggaggttggattattgagattgtagtgagttgcgatcgggttattgtattttagtttgggtgacgatagatttagattttgttttaaaagataaaaattaaattaaaaaaattatttcgattgttttattttgggagttagacgtggatttgaattttagttgtatttttattggtagtgtgttttgggtaagtttttgtttttttgtttataaggtgagggttaaaattttttattttgggagttttaagagaatttagttggaaggtagtttagttgaaggttaggtattggttaaattttaggggaattcgatttaagttattttttttttttttttttttttttcgaggaaagttttattttttgtttttttcgtttttagaaagaaagagaaagaggaggggtgagtagggaagattcgggttttttgattttttagtatttattattgttttagagggttggttttttttttgatagagttaaggtgggaaagagaggttaagagttagggaggtcgggggtttttttgggttttagataagggtatattttagaaaatgattacgtcggttttttttagtgtattgtttttattttgtttttacgtttttatttatttgttttcgatcggagtaatttaagatagagtagaatggttatagtttttagttgtttaggttttaggatttttttttgggttatggtttaggataagggtttttggggtagattttaggtacgtaaggtaggaagttttggggtggtgtcgaaggtaggatttagatgttggtttagagggaaggattttagaattcgggttggaaaggggtagtaagtgtttaaggttggtttttaaggtagggagcggtcgtaacgggagacgtttggagtattcgaagcgagtagtgtggacgagttattagtatcgtttggttacgtagggtttttttaggagtggttgtatttatttgttcgttttttttttggtttcgtttattggttgggtttcgttagttttttttgttattaaagttatgagtttttttagagttgtaggttcgtgtgtgtgtatgtatgtgttcgtgtgtatgtgtgtgtatatgtataggttttttgtgtgtgtgtttcggtgtgtagtgtgtatgtggtgtgtgtgtatgtttgtgtaggttgtgtgtgtttttttatgtggtgtggtatgtgtgtgtgtgtgtatgtataggttgtatgtgtatatgtgtaggttgtgtgtgtttttgtgtgtgtagtgtgtgtgtttgagtgtgcgtgtatgtacgtgtatgtggtttgtgtgtgtgtgtagtttttttggaatgtgacgattttttttcgttttaggttttttaggttattttaggttagttatgttttttagggtttggttttagtttttattatttggagttatagttatttttttttttttttttttttttttaggttggttatgggagtttaagatattatggtttgttttttgttaggttttttttgcgatgtttgtattttatgggtggtggcgagtttgtggagtagtattaattattttatagatattttttaagtgtttatgatgtttttaggtgtttaggataaaataggtattagtttcgttttttttgagttttgagtttatggtgaagtaggggtgatatattttaattaaataattataaataggttggtaaggtggttagtcggttttgggaggttgaggttggagtattatttgaagttaggagttttagattagtttggggaatatagcgaggttttatttttataaagaaatataaaaattaggtaggtattgtggcgtatgtttatggttttagttatttgggaggttgaggtaggaggattgtttgagtttaggagtttaacgaagtattgagttatgattacgttattgtattttagtttgggtaatagagggagattttgttttaaaaaaaaaaattgtaattatataataattttaagttaggaatagtgatgaaaaagaatggcgtgagtatattatagtttggtaaaggtt

SEQ ID NO: 636 - DNA, 2481 bp, Artificial Sequence
  chemically treated genomic DNA (Homo sapiens)
agtttttgttaggttgtggtgtgtttacgttatttttttttattattatttttagtttgaaattattgtgtaattgtaatttttttttttaagatagggtttttttttgttgtttaggttggagtgtagtggcgtgattatagtttaatgtttcgttgaatttttgggtttaagtaatttttttgttttagttttttaaatagttggaattataggtatgcgttataatgtttgtttaatttttatatttttttgtagagatgaggtttcgttatattttttaggttggtttggaatttttggttttaagtgatgttttagttttagttttttaaagtcgattagttattttgttagtttgtttgtgattatttgattgaagtgtgttatttttattttattatgagtttagggtttaagggggacggggttggtgtttgttttgttttggatatttgggaatattataggtatttaggaaatgtttgtgggatgattggtgttgttttataagttcgttattatttatgaggtgtaggtatcgtagaaagggtttggtaggggatagattatagtgttttaagtttttataattagtttaaggagggagggaagaagggaggagtggttgtggttttagataataaaagttggggttaggttttggggggtataattggtttgagataatttgaaagatttgaggcggaggagagtcgttatattttagggagattgtatatatatataaattatatgtacgtgtatgtacgtatatttagatatatatattatatatatagggatatatatagtttatatatgtgtatatatagtttgtatatgtatatatatatatatattatattatataagaggatatatatagtttatataggtatatatatatattatatatatattatatatcgggatatatatataaaaggtttatgtatgtgtatatatatatatacggatatatatatgtatatatacgggtttgtagttttgaaaggatttatgattttggtggtaagaggagttggcggagtttagttagtgggcggggttaggggaggggcgggtaggtaggtgtagttatttttgggaggattttgcgtggttagacggtgttggtgattcgtttatattgttcgtttcggatattttaggcgtttttcgttgcggtcgttttttgttttagaggttagttttggatatttgttgtttttttttagttcggattttgggatttttttttttgagttaatatttgggttttgttttcgatattattttaaggttttttattttgcgtgtttggagtttgttttaggggtttttgttttgggttatggtttagaagggggttttggggtttgggtagttgggggttgtggttattttgttttattttggattatttcggtcggggataggtaagtgaggacgtgggggtagggtggggataatgtattggagggagtcggcgtgattattttttggggtgtgtttttgtttggggtttaagaaaattttcggtttttttagtttttggttttttttttttattttggttttgttagggaaggggttagttttttggagtagtggtgggtattaaggggttagggaattcgagttttttttatttattttttttttttttttttttttttaggagcggaaggggtagaaggtgagatttttttcggagagggaggaggggagggggaggtgatttggatcggatttttttggggtttaattagtgtttggtttttagttgggttgttttttaattagatttttttagggtttttagagtggggggttttagtttttattttatgggtagagaagtagggatttgtttagggtatattgttagtgaaggtgtagttgggatttagatttacgtttgatttttaaagtggggtaatcgaggtggtttttttggtttggtttttgttttttgaaatagggtttgggtttgtcgttatttaggttggagtgtagtggttcgatcgtagtttattgtagttttagtgatttagtttttcgggtttacgtgatttttttatttttttattttagtttttttagtggttgggattataggtgtatgttattatatttagttagttgtgttttgtttttgtttttgtttttgtttggtagagatgtgggttttattatgttggtcgggtaggttttgaatttttgggtttaagcgatttttttgttttggttttttaaagtgttgggattataggtgtgagttatcgtttttattttggaggtggttttgagggaattaaattaagggtttttttttttggaaggtatttaatttagttttgagttagatcggtttttaattttggtttttttatgtattggttgtgtgttattggttaagtttttttatttttttaagttttagattttttatttttaaaatgaagttggttatgt

SEQ ID NO: 637 - DNA, 2444 bp, Artificial Sequence
  chemically treated genomic DNA (Homo sapiens)
tagattttaggtgttttggagttttgtagattagagaggttagtattggaagtttgggtttatgtttttagtagtttttagtttagggggtttttaaggttgaatagtaagtttaggattattttggtggtggggtaggtttagtttatatttagttttggtaagtagttttagaaattgttagtgacgttgtttttaagttaaattttaggaggaaaagaaaatacgaggataataaagagaggaagtggtttgggtcggtttattcggtgggttttgttttgttttttaattattttggttggttttataggggtcgttaattatataagttagtttttgtttttgaggatttggtttagggattttgggaatgtggtagatatggggtggttttattaaatgtatttttatgggaatttgttttttgggagttatgaaaagagcgtggatttcgaggtggggttataggaagtggttaggtttattttaggggatttgttgtttatttatattgttggttaggaaatggggggtaatttatgtttttttagtatttttagtattgggcggtttaaagaagggaagggattattttggggttatatagtatgtagttagaggttaaggtatgaggaagttttttatttttttatttttatttattttagattttttaatcggttttatggtagtttagggtttagcggtatttaggatgttggtgggtagttgtatagtttaggtcgcgggaggttggttgtttttatttaataggtttatgtggttttgatttttatttaggaagttggggataatggttaaggcgttttttttttttgtgtttgtttgtttaggtgtagtatagatatagtatttttggggttaagagtatttagttagggttgtttttatgggtgggtagggtagtaaatgaatgagggataggttgggaggtggttagttttttttagtttatggagggtacggggtaggagagttgggttgagttagtaggagtttagggagtttggtttttgtttttttattttggaggaaggtgaggttgaattttttttttttttttttttttttttcgtttttattgtacgtagggttggttgggttttagttggttttcgtattaatattttatcggcgttaataggaggtatcggggatagtcgttgcggtagtattcgagttagtttaagttcgtagttcgtagggagatttagtttcgttttgtttgtagtagtataattttgtatatttattatggatgtttttaagaagggtttttttatcgttaaggagggcgtggtgggtgcggtggaaaagattaagtagggggtgacggaagtagttgagaagattaaggagggggttatgtatgtgggtaagtggggtatggtagggtgggatagtgtggtggttaaagggtgagtgtttagttattttcgttagattttattttttagttttagggaggtattttgggagggggcgaggttttggttattaaggtggggtttttagattttggagtatttataatgttttgtgtatatttatgtgtgtttgtttttggttttttcggggtttttgggtgttagagatcgtagatagggttggttatttgtttgtgtacgtatatatatatttttaagtatattagttttttttgagtttggagtttttgaagttatgagtagtttgtgtttaggtggtttttattttttttatacgggagcggttatagttaggttacggattttttttttttttagagagaaggggtaggttgggggatgaaatttaggtttagtgttttttttttcgtatttttttttggtattttttagaggaggaaggggaggttaagttaatgatttagttttggtttattttgttttgttgttgtttttgaggttcggttatattcgggtaggggttggattttgggtttagttagtgtttttattttaggtttgtttttttttgttttttatattttgttttgttttttttttatttatttattttttttagatatagtaggaagaggttttttgaaggggtcgtcggtttttagatattatttttatttttttatcgattttatagtttgtttagttgttttgttgtgtttgttttgatcgtttttaatatttcgagggaggtttgggttgatagttttattttttttttaggagttaagattaaggagaatgttgtatagagcgtgattttaggtgagaagttttagggttaggggatatatgggggataggatttttggggtttttgtattttagtgttggggtttaaatttagagttttgttttatttttaattggggttttaagttttatagatttttgtagattatgaggttaaattagggtgggcgtttttttatttttattagtattagaggtgtt

SEQ ID NO: 638 - DNA, 2444 bp, Artificial Sequence
  chemically treated genomic DNA (Homo sapiens)
ggtatttttgatgttggtgggggtaaggagacgtttattttagtttagttttatggtttgtaggggtttgtagggtttgggattttagttgggggtaaggtaggattttaggtttgagttttagtattaggatgtaggagttttaggggttttattttttatgtgttttttggttttggggttttttatttgaggttacgttttgtataatattttttttggttttggtttttggggaggaaatggagttgttagtttagatttttttcgaggtgttgggggcggttaggataaatataatagaatagttggataaattgtggggtcggtgggggggtaaggatggtgtttgggggtcggcggtttttttagagggtttttttttgttgtgtttggaagaagtggatggatgggaaggggataggatagaatgtgggggataagagagagtaggtttgaggtagggatattggttagatttagggtttagtttttgttcgggtgtggtcgggttttagaagtagtaataggataggatgggttagagttgagttattggtttgatttttttttttttttttggagagtgttaggagaggatgcgggggagggaatattgagtttaggttttattttttagtttgttttttttttttggggagggaggggattcgtgatttggttgtagtcgttttcgtgtggagagggtgggggttatttgagtataggttgtttatggttttaggggttttaggtttaggggaggttggtatgtttgggaatgtgtgtgtgcgtgtatagataggtagttagttttgtttgcggtttttgatatttagaggtttcgaggaggttaaagataaatatatataggtgtgtatagggtattgtgggtgttttagggtttggagattttattttgatagttagggtttcgtttttttttaaaatgtttttttggggttggggagtaaggtttggcgaaggtaattgggtatttattttttggttattatattgttttattttgttatgttttatttatttatatatatgattttttttttggtttttttagttgttttcgttattttttgtttggttttttttatcgtatttattacgttttttttggcgatggagaagttttttttgaagatatttatggtgggtgtgtagggttgtgttgttgtaggtaggacggagttggatttttttgcgagttgcgggtttgagttggttcgagtgttgtcgtagcggttgttttcgatgttttttattgacgtcgatgaaatattgatgcggaggttagttggagtttagttagttttgcgtgtagtgggggcggggagggagggagggagggaaggaggtttagttttatttttttttaggataggaaggtagagattaggttttttgggtttttgttggtttagtttagtttttttgtttcgtgttttttatgggttggagggggttggttattttttaatttgttttttatttatttattgttttgtttatttatgggggtagttttggttgggtgtttttggttttaggggtgttgtgtttatgttgtatttggatagataggtatagagaggggaggcgttttggttattgtttttagttttttaggtaggggttagggttatataggtttgttaggtgagagtagttaatttttcgcggtttgggttgtgtagttatttattagtattttggatgtcgttggattttgggttgttatgaaatcggttggaggatttgaggtgggtgggggtggggaaatgaaggatttttttatgttttggtttttggttgtatgttgtgtgattttagaatagtttttttttttttttgagtcgtttagtgttgaaggtgttgaggaggtatgaattgttttttattttttggttagtagtgtggatgggtagtaggttttttgagatggatttgattattttttgtggttttatttcgaagtttacgttttttttatggtttttagggagtaggtttttataaggatgtatttggtggggttattttatgtttattatatttttagagtttttgagttaagtttttagggataggaattggtttgtgtggttggcggtttttgtggggttagttagggtagttggggggtaggataagatttatcgggtaggtcggtttaggttattttttttttttgttgttttcgtatttttttttttttttgagatttaatttgaagataacgttattagtagtttttggagttatttgttaaggttgagtgtgagttgagtttgttttattattaagatgattttgagtttgttgtttagttttgggggttttttgggttgggggttgttgggggtatgggtttaggtttttagtattagtttttttgatttgtagagttttaggatatttggggtttg

SEQ ID NO: 639 - DNA, 2489 bp, Artificial Sequence
  chemically treated genomic DNA (Homo sapiens)
ggaagggttgaggttgtttttgaattattttttttttttatgttttatagttttcgggttttttatttttattttattttgtatttcgcgttaagtcggggagagaaggtgtgggtgtagttatttttggggatttttatttatatttagtcgggtaggggagaaggggtttatagatgtttttagtttttttttttttagttttgagttttttttttatatttttttcgtttcggatgtaggaagtggggggaggttgttatggaaacgttttttttttttgtggttaaggttattggggtgttttcggagatttaggggttaatcggtcggtgtttatatttatttgtggggattagtgtcgcggcggagaagagtaatagtagaagtcggagtcggagttcgggaggcgtcgtcgtcgtcgttgtcgtcgtatattgggattcgttcggtagtattatattcgttatgtcgggtatttgttttagattggcggcgttggttgttttcggagttcgagcggatagttaatgagatgttaatgatatgcgttggaggcggagttcgggtagattaattatagcgtcgcgagtttaattcggttttcggagggtttcgtttttttttttatttcgttttttggcgttggcgttcggcggcgcgttcgcgttatttaggggcggggttaaggggaggggcgtatgtaaatatgtttatgttaaaattcgggttttgtttttttcggattaaggaaaaagtgttttttcgggcgtttggcgtgtaaggattcgggttttagggggcgggtttagttttttgtatatttttattaggaatgtttatagtaatcgttgtattagatcgacgattggagaattttttttaagagggttttttgtttcgtatatcgagtgtatttggtttagcgaattagacgttgtaaattttcgttatttattttgtatcgaaggaatagatttttgggaacgggggttgtgcgggagtggagagtaagaaggtaggttttcggattgataaaataatttgggagaagtgtatgcgtgttttgtacgttcggcggagcgggagagttcgtttaatagtttagcggtagattcggggatagttggagaaggtagtcgtagagtcgggttttgagattttttagtcggtttttttgcggtagaatttcgggaaaggtagatcgaggagggtatgtttaggttttttcgtttgtcgagggttttttttttggttttaatatataggtgtgtgttgaatatatgtgtgaaatatttgtaatattagatatttaagattatataataacggaaaaaattagttaaggttttaggtgaagagcgggggtggtgggagttggggagagggagtgtggtgaaggtagggtttgtcgtgtttttttttcggggtttaaatttttttattttttttttgcgtttttagttttttttaaggaagttggggattaataggtgtttcgagttttttttgtttttgggagagttttttttgttaaagcgatttgtattttcggatttatttttttttttcgaaattttttttgttttttttttagttaggtagtcggtttttttgtttgtttgttttttaattatttattttttttttttttagaagatcgtgtgcgttttgattttttgttgtttaagtattaaattgaaggacgagttatattaagtgtaaaggtttataataatttaagtatttatagaatgtagaataataagatgtaggaaatataatttgtataataaatattaatattataatagttaaaataaattatgataaattatttgtggttaaatgattaagagattattgaatgtaaattgttaagtttgagttatagtttagaagagttgcgttaaatgatttttttagttttttgtttttattttgttataaaataaataaataatatatattaaaaaggaagttatgatttgttaatttattaaatgagttatatttaaaaatagttttttattatttattatgtataaattaatttcgagattgttcggtttttatagttttggatattttgttttgtaattataggtttcgatgtatgaattgtaggtagttttttagaagtggggaaagttttaataggagaatagtattataggagataggaaattattgttacgtgggtgttaggataatgtttagtttgtaaagttttattcgtttttattatttttggtagtgaggtatttgggtcggattaaatagagagtaaagttttattaaaattggaataaaaaagttaaggttagtcgggtacgttgattgatgtttgtaattttagtattttgggaggttgaggtagatggattatttgaggttaggagttcgagattaatttggttaatacggcgaaatttcgtttttaataaaaatataaaaattagttaggcgtgatgatatatatttgtaat

SEQ ID NO: 640 - DNA, 2489 bp, Artificial Sequence
  chemically treated genomic DNA (Homo sapiens)
attataggtgtgtgttattacgtttggttaatttttgtatttttattagagacggagtttcgtcgtgttggttaggttgatttcgaatttttgattttaggtgatttatttgttttaattttttaaagtgttgggattataggtattagttagcgtgttcggttggttttaatttttttattttaattttggtggaattttgttttttatttggttcgatttaggtattttattgttagaggtagtaagaacgggtaggattttgtagattgggtattattttggtatttacgtggtaatggttttttgttttttgtagtgttgtttttttgttggagttttttttatttttgaaggattgtttgtagtttatgtatcggggtttgtaattatagagtagaatatttagggttgtgaagatcgggtagtttcgaaattagtttatgtataatggataataggaggttgtttttaagtgtaatttatttggtgggttggtagattatgattttttttttgatatgtattatttatttattttatagtaagatgaggatagaaggttggggaagttatttggcgtagtttttttagattatagtttagatttagtaatttatatttagtaattttttggttatttagttatagataatttgttatggtttgttttagttgttgtgatattgatatttattatgtaaattgtattttttatattttattgttttgtattttatgaatatttaaattattataaatttttatatttaatatggttcgttttttaatttgatgtttgagtaatagagggttagagcgtatacgattttttagaggggaagaaaataagtaattaaaaagtagataaataagagagtcggttgtttggttgaaaagaaagtaaagagaatttcggggagggagagtgagttcggagatgtaagtcgttttagtaggagaggtttttttagagataggggaagttcggagtatttgttggtttttagtttttttaggaagggttgggggcgtagaggaggagtgagagggtttgagtttcgaaggaggaatacggtagattttgtttttattatattttttttttttaatttttattattttcgttttttatttgaagttttgattaatttttttcgttgttgtgtaattttaaatatttaatattataaatattttatatatatatttaatatatatttatatattaaaattagggaggagattttcgataagcggaggagtttgagtatatttttttcgatttatttttttcgagattttgtcgtaaaaagatcgattggaaaattttagaattcgattttacggttgttttttttaattattttcgagtttatcgttaggttgttgagcgggttttttcgtttcgtcggacgtgtaaagtacgtatgtattttttttagattgttttgttaattcggggatttgtttttttattttttattttcgtatagttttcgtttttaaagatttattttttcggtgtaaggtgagtgacggaaatttgtaacgtttggttcgttaggttagatgtattcggtgtgcgggatagaggatttttttaagggagattttttagtcgtcggtttgatatagcgattgttataaatatttttaataaaggtgtataagaagttagattcgttttttggagttcgagtttttgtacgttaggcgttcgggagaatattttttttttgattcggggaaagtaaaattcgaattttaatataaatatatttgtatacgtttttttttttggtttcgtttttaggtggcgcgggcgcgtcgtcgaacgttagcgttagggggcggggtgggggagggagcgaggtttttcgagagtcgggttgggttcgcggcgttgtgattggtttgttcggatttcgtttttagcgtatgttattagtattttattagttgttcgttcgggtttcggaggtagttaacgtcgttagtttgaggtaggtgttcgatatggcgagtgtagtgttgtcgagcggattttagtgtgcggcggtagcggcggcggcggcgtttttcgggtttcggtttcggtttttgttgttgttttttttcgtcgcggtattgatttttataggtaggtgtgggtatcgatcggttggtttttaaattttcgaaggtattttagtagttttggttatagaggggggaaacgtttttatgataatttttttttattttttatattcgaagcggagggagtgtggagaggaaatttagggttgagagggaaggggttgagggtatttgtgagtttttttttttttgttcggttaagtgtgaatgagagtttttagggatggttgtatttatatttttttttttcggtttggcgcggggtgtagagtggagtgagaatggggggttcgggggttgtaaagtatgggggaaggggatggtttaaagataattttaattttttt

SEQ ID NO: 641 - DNA, 2197 bp, Artificial Sequence
  chemically treated genomic DNA (Homo sapiens)
ttatatttagttttttgaagttttggttgtataattaatttgtggaaggtatgaatatttatgtgcgttttaattaaaggtttttttgaattattttttatatgagaatttttaatgggattaagtatagtattgtggtttaatataaatatataagttaggttgagagaattttagaaggttgtggaagggtttatttattttgggagtattttgtagaggaagaaattgaggttttggtaggttgtatttttttgatggtaaaatgtagttttttttatatgtatattttgaattttcgtttttttttttttagatgttttttgttagtttttttagttgttaaatatagttgtttgtggttggttgcgtatgtaatcgtatattttattttatttgttttatttcggttatagtgtagttttttttagggttattttatgtatatattacgtatttttagttaacgaggagggggaattaaatagaaagagagataaatagagatatatcggagtttggtacggggtatataaggtagtatattagagaaagtcggtttttggattcgtttttcgcgtttattttaagtttagttttttttgggttatttttagtagattttcgtgcgttttcgttttttggtcgtgaaatttagtttttatttagtagcgacgataagtaaagtaaagtttagggaagttgttttttgggatcgttttaaatcgagttgtgtttggagtgatgtttaagttaatgttagggtaaggtaatagtttttggtcgttttttagtatttttgtaatgtatatgagttcgggagattagtatttaaagttggaggttcgggagtttaggagttggcggagggcgttcgttttgggattgtatttgttttcgtcgggtcgttcggttttatcggattcgtaggttttcggggtagggtcggggttagagttcgcgtgtcggcgggatatgcgttgcgtcgtttttaatttcgggttgtgttttttttttaggtggttcgtcggtttttgagttttttgttttgcggggatacggtttgtattttgttcgcggttacggattatgattatgattttttatattaaagtatttgggatggttttattgtattagatttaagggaacgagttggagtttttgaatcgttcgtagtttaagatttttttggagcggtttttgggcgaggtgtatttggatagtagtaagttcgtcgtgtataattatttcgagggcgtcgtttacgagtttaacgtcgcggtcgtcgttaacgcgtaggtttacggttagatcggttttttttacggtttcgggtttgaggttgcggcgttcggttttaacggtttggggggtttttttttatttaatagcgtgttttcgagttcgttgatgttattgtattcgtcgtcgtagttgtcgttttttttgtagttttacggttagtaggtgttttattatttggagaacgagtttagcggttatacggtgcgcgaggtcggttcgtcggtattttataggtattcgcgttcgcgtcgttcgtcggggtggtcgtcgcgttcggtaggagggagggagggagggagggagaagggagagtttagggagttgcgggagtcgcgggacgcgcgattcgagggtgcgcgtagggagttcggggcgcgcggtttagttcgggggttttgcgtgtagttcgcgttgcgtttagagttaagttttttcgtcgggtagttgaaaaaaacgtattttttatttatttatcgttcgtgcgagaggtagattcgaaagttcgggttttttaataaaatatacgttggaaaattagataaagtagtagttatttgtgggggaaaatatttttaggtaaataaatacggggcgttttgagttatttgggaaggtttcgtttttggtatttaaagttgggggtgtttggagttagtagagtttagtagagttttatttatttttttaatgtttttgtttaatgtgttttttaaatttttttttatttagattatttgattggaaatatgttagttatgatgatgattttttgggaagcgatttttgttattcgttttttttttttttttattttacgttttggggttttagagagcgattgggagttgaatgggtttgatttcggagttagttggttgagttcgcgttg

SEQ ID NO: 642 - DNA, 2197 bp, Artificial Sequence
  chemically treated genomic DNA (Homo sapiens)
tagcgcggatttagttagttaatttcgaaattagatttatttaatttttaatcgttttttaaagttttaggacgtggggtggggaggaggggaaagcgggtgataggaatcgttttttagaaagttattattatagttgatatatttttaattaaatagtttagatgaaaggaaatttggggagtatattaaataaaaatattaaaaggataaataaaattttgttgagttttgttaattttaaatatttttaattttaaatgttaagagcgagatttttttaagtgatttaaagcgtttcgtgtttatttgtttggaggtgtttttttttataaataattgttgttttgtttggttttttaacgtgtgttttgttaggaagttcgggttttcgggtttgtttttcgtacggacggtaagtgggtggagagtacgttttttttagttgttcggcgagagaatttgattttgaacgtagcgcgggttgtacgtagaattttcgggttgggtcgcgcgtttcgggttttttgcgcgtattttcgggtcgcgcgtttcgcggttttcgtagttttttaggttttttttttttttttttttttttttttttttttgtcgggcgcggcggttatttcgacgggcggcgcgggcgcgggtatttgtagaatgtcggcgggtcggtttcgcgtatcgtgtagtcgttgggttcgttttttaggtagtagggtatttgttggtcgtggggttgtaggaaaggcgatagttgcggcggcgggtgtagtagtattagcgggttcggagatacgttgttgagtggggggaaattttttaggtcgttggagtcgaacgtcgtagttttagattcggggtcgtaggggaggtcggtttgatcgtagatttgcgcgttggcggcggtcgcggcgttgaattcgtaggcggcgttttcggggtagttgtatacggcgggtttgttgttgtttaggtatatttcgtttaggggtcgttttagggggattttgagttgcggacggtttaggggttttagttcgtttttttggatttgatgtagtagggttattttagatgttttggtgtggagggttatggttatggttcgtggtcgcgggtagggtgtagatcgtgttttcgtagggtagaaggtttagaaatcggcgggttatttggaaaaagagtatagttcgaggttagaggcgacgtagcgtatgtttcgtcgatacgcgagttttggtttcggttttgtttcgggagtttgcgggttcggtgaagtcgggcgattcgacgggagtaagtgtagttttaggacgaacgtttttcgttagtttttgggttttcgggtttttaattttaagtattggtttttcgagtttatatgtattataaaggtgttggaggacggttagggattgttgttttgttttgatattggtttaaatattattttaggtataattcgatttggagcgattttaaagagtagtttttttgaattttattttatttgtcgtcgttgttggatagaggttgagttttacggttagggggcgggggcgtacgaggatttgttaaaggtggtttagggaagattgggtttaaaataaacgcgaaagacggatttaggggtcggttttttttaatgtgttgttttatgtgtttcgtgttagatttcgatatatttttgtttgtttttttttttgtttgatttttttttttcgttggttagaaatacgtagtgtgtatataggatgattttggggaggattatattgtaatcgagatagggtagatagaatggggtgtgcggttgtatacgtagttagttatagatagttatatttagtagttgggggaattgatagggggtatttgaggggaagggggcggagatttagggtatatatataggaagagttgtattttgttattaggagaatgtaatttgttaggattttagtttttttttttgtaaaatgtttttaaagtagatagatttttttataattttttgagatttttttagtttgatttgtgtgtttatgttggattatagtattgtatttggttttattaggaatttttatgtgaaggatgatttagaaaaatttttggttagggcgtatatgggtgtttatgttttttataggttggttatgtaattaaaattttagaaaattgaatataa

SEQ ID NO: 643 - DNA, 2302 bp, Artificial Sequence
  chemically treated genomic DNA (Homo sapiens)
aaattttagatttttttttttattaaatatttttagtttaggttgtagtaggtggatataggtcggtagttatgaacgtaggtttatatgggagttgtagtttcgagttaagcggttgttttatagaacggttagaagcgagatttcgttttttaggagatatttcgtcgtgtaaaatggtacgttacgaggtggagtatttgttcgacgagaaataagaggcgggattgtaatttttagaagttttcgcggttaaggttttaggtcgtaggttgaagttaaggagggagagtttaggtagattcggtttaatattaggtgcgagtagggattatttttggtagtttgggttcggtttaggttagaattttattaaaataattattgtgagtattttttattggttttagtatatttttgagagattagaataataatagtagtaaatttgtaagtggtaaatttttataagtataattttaatttagatttcggttttaggtaatattttttggttatttgatttgggagtattgagttttttgttttttagataagcgttgtgagtggttgttttaaggtaatatagcgagggtagaatgtgagtttatagagaaatttgtagatgtattttaagttttattaatttgtttttttattttttattattattaatttggatatatttttaaaatttttttttttgacgttaaaaataaaaataataattataaaataagtgtaagaaagttcgattaagtatcgatgagtttttttataataataaattcgatgtttttttgtttgtttttgaagtagtaatgtaaaattattttttaaaatgttgttttttttatatttcggtttgtttttgttttgggtacgtgtttagtaattttttaggggaatttagagttgcgtgtttaatatagatttgttgggacggattttcgttatttgtttatgaaattgacgaattattttaaaacggcgggtgtcgattatatttttagagttaagagttgtggcgttttcggattcgttggcgtggtttcgtgttttagtttttttaatgtataaatacggtggaggaggaacgggttagggttagggtcggtgtttgggaattggggggttcgagtttttattttgagattttcgtggggcggaagagtattcgggatagaagtttatcgtttcgtgagcggcgtcggttttattgggtttcggggtgatgatttgacgcgcgtggaaatttagattcgcgttttagaaatagtattttatttgggtttgttttttcgtttttattttttaggatgttgatagttgggaatgaaaggtagagggagggagcgcggggtcggagcgtcgtttgggagtgtgtttattgggtggtcgtttgagggattcgggaatagagggtaaaaagttttgtgatcggatagagtagagcggggattgtaatttttagaagattttacggtaggggcgggatttaagatggtcgtttgtttggggataggagcggaggttaatacgcgtagagtatgcgtttacgtcgggttaattgaaagttatagtgatagtaattttgatttaggggcgggaaatattgattatagaagataagttgaggtgagaatttttttataagggggtttggggtataaatcgtataatttttggttttttttaattagaaaaagaaatatgattttttttacgtgtaacgaaaggttgtatcgtatttttgtttttttttttttttttaaaacgcgtttaattatttttttacgattttttattggttggattttttttcgttttatttttttattttggatttttttggattttttaagtttttttttttttatgtgttttttagaaatatagatttgtagtttttggtttgatttattaaataatgtggttatttacgattacgtttagttttttttggtattttaataaaattgtattatatgcgttttttttttttttttttttgttttttttgtgttgtttttttttttagtatttgtcgttacgaagtattgtataaaatttacgtatttattttttttattattttatttttttattagaatgtaagatttttgtagatgtggatttttgttttggttattgtagtttttttagtatttagaaaagtgtttagtatatagtaaatatatcgtatttttaataattgaacgaaatttagagtgattttttttttttagtttttttttttttggtgtagattaattcgtttttgattattatggttttttgt

SEQ ID NO: 644 - DNA, 2302 bp, Artificial Sequence
  chemically treated genomic DNA (Homo sapiens)
ataaggaattatggtggttagaaacgggttgatttgtattagagaaagggagattaggggagaaaggttattttagatttcgtttaattattgaaaatacggtgtatttattatgtgttgggtatttttttaggtgttagaaagattatagtgattaaaataaaaatttatatttgtagggattttgtattttagtgagaaagtaagatggtaaaaaagataaatacgtaaattttatataatgtttcgtaacgataaatgttaaggagaaaaatagtatagaaaagatagaaaggaaaagagaaggggcgtatgtggtgtaattttgttaggatgttagggagggttgagcgtagtcgtaaatgattatattatttgatggattaagttagggattgtaagtttgtgtttttgagagatatataaagaaaagaaggtttaaggaatttagaaagatttagagtggggaaatgaaacgaaaagaaatttagttagtgggaagtcgtgaagggatagttaaacgcgttttgggaggaaagaaaaaagtaaaagtgcggtatagtttttcgttatacgtgaaaagaattatgtttttttttttagttagaaaaagttaaagattgtgcgatttatgttttaaatttttttgtaaggggatttttattttaatttgttttttgtggttagtgtttttcgtttttgaattagggttattgttattatggtttttaattggttcggcgtaggcgtatgttttgcgcgtattggttttcgtttttgtttttagataagcggttattttgggtttcgtttttatcgtggggttttttgggaattgtagttttcgttttgttttgttcggttataggattttttgttttttgttttcgggttttttaggcggttatttagtgggtatatttttaggcggcgtttcggtttcgcgttttttttttttgttttttatttttagttgttaatattttggaaggtaggggcggggaggtaagtttaagtggaatattgtttttggggcgcgggtttgggtttttacgcgcgttaggttattatttcggagtttagtggggtcggcgtcgtttacggggcggtgggtttttgtttcgagtattttttcgttttacgagggttttagggtggggattcgggttttttaatttttaagtatcgattttagttttaattcgttttttttttatcgtgtttatatattggggaaattgaggtacggggttacgttagcgggttcggggacgttatagtttttggttttgggggtgtagtcggtattcgtcgttttgggatggttcgttagttttatagataagtagcgaaaattcgttttaataggtttgtgttaaatacgtagttttggatttttttaaggggttgttgaatacgtgtttaggataggagtaaatcggagtatagagaaggtagtattttgggagataattttatattattattttaaaaataggtaaagaggtatcgaatttattgttgtgggagaatttatcggtatttggtcggatttttttatatttattttatggttgttgtttttatttttagcgttaaaggggggaattttaaaggtatatttaagttggtggtggtggggggtaaggaggtaggttagtggaatttgagatgtatttgtagatttttttgtaggtttatattttgttttcgttgtgttattttggaatagttatttatagcgtttatttgggaaataaggagtttaatgtttttaggttaagtggttaaaggatgttgtttgaagtcgaaatttaaattgaggttatgtttgtgaaagtttattatttgtagatttattgttattattattttggttttttagaaatgtgttgggattaatagaaaatatttatagtggttgttttagtaaggttttgatttgggtcgggtttagattattaagggtggtttttattcgtatttgatgttaagtcggatttatttgaattttttttttttggttttagtttgcggtttgaggttttggtcgcggaggtttttgggagttgtagtttcgttttttgtttttcgtcgggtaggtattttatttcgtggcgtgttattttgtacggcgagatgttttttgggagacgaagtttcgtttttagtcgttttgtagagtagtcgtttgattcggaattataatttttatgtggatttgcgtttatggttgtcggtttgtgtttatttgttgtaatttggattagaaatatttagtaaagaaagaagtttagggttt

SEQ ID NO: 645 - DNA, 2488 bp, Artificial Sequence
  chemically treated genomic DNA (Homo sapiens)
tttttatttaagtttaaagtagtagaagaagggttgaggttaattattagttaagtagtttttatttttttttttattcgtagggtttgtagggtagtgggaagagttttgggttatagatttagaaattttagatttttatattggttttgttgtggaattgttataatatatttttatttttttggttttagtttttttgttgaattagatggtatgggaatttttaagttttttatttgtgagattttttgaattttgatttttttttattttaatattatagtagttttttatatttttttaaattagtgatttttttttttaggttttgattttgttttgggattttttattgtatattagaagtttaatggttttttttgtttatttttcgtatagataggtgagttttgggttgtaggaaaggtttagttgattatgggttttttgttttattttattacgaggtttatagatagtgatgaaggtttggatatatagattgtaggataaggttagattggttggtgagaaagggtattttttagtaagaatttttttttttaattaagtagagatggggattgttgtttattgtaggtttttgttttacgttttttttatatttgatttattgatttatagttttttttttattaatttttttttttttaggtattttttatttgtttatattattgtatattttttggttgttttattttttttttgggtttagttttttttaatttttaaattatttatgtttttgtttttttttttttttggttatatttttttttttgtgattagtgttttttatttaaattttttttttatttttaaattatatatttttttttttggaaagagttttttatatagttgtttttttttattatttttttatcgtggtttttaattagatttggattattaaagttttttttgaataggttttatttgttttaggttaggttgttattttcgcgtttttttattttttagttttaattaggagggatgcggtaggagtgttgcgtggggttaggtacgttattagttagtttttaagttaatattttgagtttcgcggtttgtttatcgagtgattttatgtagttatcgaaatttttgttgtttattagtttttaggtgtttaggaaagcgtttattatagtgatgttgggttaggttgagagaagttataagagagtaggcgtgtaagggtttcgacggcggttttttgttcgggttgtcgttttaaatagttttcgtattatatgaggagacgtggtttacgttttcggttttcgaaataggaagttttaggttagggtttatttaggaggggttggtgcgtttattttttaatttatcgaggtgggtggggattagttagtggcgttttgttagtttgcgttagcgttagtgtttggttttcgagtttttattttaggttggtaggatttttttttttttttggtttttaggtattttggaatttgagaaggaagtagttaatattagttcgagagttagggcgtatgttatggtggatattttttcgttttttagtttttttttgagtttagcgttagagtagagatgagattagaaaagtaaaacgtttttgggttggtgtttacgtcggggaaagttttggttgatttttggtacgggtatttgttttcgttttataagtgaggagttcgaggtttataggggaattgataaggttttaagaaataggagggggtgaatggagtttagattgtaagtttagtttagcgggttttagagttcgcgttttttttttatttttattgtttggtggcggagatagttattagcggttcggtttgcggttgagttgattttgttttttgtttgttttgagtaaaagtttgatttttcgcgtttcgttcgttttatacgtgtttgtttttttttgcggaatgttttttgttggttttttttcgtttttattttattttattatttagttttttattcgtttttgtaagtgttttgggttttttcggttttttcgtatagtttcgagttttagtttaggtcgtttttagttttttttttgtagaaattttgttaattcggttagttttttaaggtttatggttgttttttttatttgtcgttttttttttggtttgtgtatattagtaagtcgtttgtatttttgggtaatttgttgttttttttcgagagtttgttgtgcggtggtttgttattgtatagtttattaagtatttttagtaaaaataagatttgttttgttttgttatttattgtatgttgagggttttgggtgtattgttttattgaattttttattttattattattttttagagataaagtttttcgttgtgttttttaggttggagtattgtgacgttattatagtttattgtagttttaaatttcggggtttaggggatttttttattttagtttttttagt

SEQ ID NO: 646 - DNA, 2488 bp, Artificial Sequence
  chemically treated genomic DNA (Homo sapiens)
gttggggaggttaaggtaggaggattttttgagtttcggagtttgaggttgtagtgagttatgatggcgttatagtattttagtttgggagatatagcgagagattttgtttttaaaaaataataataaaataaaaagtttaatgaaataatatatttaaagtttttagtatgtaataaatagtaagataaggtaggttttatttttattgaaagtgtttagtaaattatatagtgataaattatcgtataataggttttcgaaaggaggtagtaaattatttaaaagtgtaggcggtttgttagtgtgtataggttaaagaaagggcggtaggtggggaaggtagttatgggttttgaagagttgatcgaattggtagaatttttgtaggaggggagttgggaacgatttgagttaaagttcggagttgtgcgaagaaatcggaaaagtttagagtatttgtaggggcgggtggggagttagatggtggggtggggtggggacggaggagggttagtaggagatatttcgtagggaggggtaagtacgtgtgaggcgggcggggcgcgaagggttaggtttttgtttaaaataggtagaggataaggttagtttagtcgtagatcgagtcgttggtgattgttttcgttattaggtagtgagagtgaagggagagcgcgagttttgaagttcgttagattaagtttgtaatttgagttttatttatttttttttattttttgagattttgttagtttttttgtgagtttcggattttttatttgtaaaacgaggatagatgttcgtgttagaagttaattagagtttttttcggcgtgggtattagtttaagggcgttttgtttttttagttttatttttgttttgacgttaagtttaaagagggattgggggacgggaagatatttattatggtatgcgttttagttttcgggttggtgttggttgttttttttttagattttagagtgtttagaggttaggaaagggagaaggttttattagtttggggtagggattcgggggttaggtattggcgttgacgtaggttagtagggcgttattggttggtttttatttatttcggtgggttgggggatgggcgtattagttttttttgggtgagttttagtttggggttttttatttcgggagtcgggggcgtgggttacgtttttttatgtgatgcgagggttatttaaagcggtagttcgggtagggagtcgtcgtcggagtttttgtacgtttgtttttttgtagttttttttagtttagtttagtattattatggtggacgtttttttgggtatttggaagttagtggatagtaagaatttcgatgattatatgaagttattcggtgagtaagtcgcggggtttaggatgttggtttggggattggttggtggcgtgtttagttttacgtagtatttttgtcgtattttttttggttaagattggggaataggggagcgcggagatggtagtttggtttagagtaggtggggtttgtttagagggggttttggtggtttaaatttggttagagattacggtagggaggtggtggaaggaggtagttgtgtgggaggttttttttaggaagagggatatgtgatttggaggtaggaggagggtttggataaagaatattgattataggaaagggagtgtagttaggggagaaaaagaataggggtatgggtagtttagaaattggaggagattgaatttagaaagggaatggggtagttagggagtgtataatgatgtaaataagtaggaaatatttaggaggaaaaagattagtggggaaaaaattgtggattagtgaattagatatgagaaggacgtaagataggaatttgtagtaagtagtaatttttatttttgtttggttagggaagagaatttttgttggagaatgtttttttttattagttagtttgattttgttttgtagtttatgtatttaggtttttattattgtttgtgagtttcgtggtagggtggggtaagaggtttatgattagttgggttttttttgtaatttaaggtttatttatttgtgcgaggggtaggtagagaaagttattggatttttgatgtgtagtagagggttttaaggtaaggttaagatttgggagggaggattattggtttaggaggatgtggagaattgttgtggtgttgggatggagaagaattaggatttaaagaattttataggtgaggaatttggagatttttatattatttagtttaatagggaaattgaaattaggagagtagaaatgtattataataattttatagtagagttaatatgaaaatttaaggtttttagatttgtaatttagagttttttttattattttataggttttgcgagtgggaagaaaagtagaaattgtttagttaatgattgattttagttttttttttattgttttgggtttagatggaga

SEQ ID NO: 647 - DNA, 2361 bp, Artificial Sequence
  chemically treated genomic DNA (Homo sapiens)
gaggggttttttgtttttttttttttttaacgtttaaattgttttagagaacgtttattttttttattatttgtgagcgtagggtgttcgtaaagaagaggaggaaggaggaaggtaggggagggagaacggtaaggagagtttcgtagggttgggagaaatgagattaagagagattgggagagggcggtagagaagagaggggggatcgagagtcgcgttttcgcggtcgcgtggatttagaaaaaggttggttttattatgatttatgtgtagtttgcgtatttaggggtagatttggggttgggcgggcggcgtcgggttcggttcgttttgcgtattcgtttgttcgttgttggtaggggcgtttttttcggtttcggacgtcgtgttaattttttttttgttgttgatgtgggtgttgtcggcgtcggtcgaggcgtcgttggagttgtttagggagtttttttcgtcgtggtggttgtcgttgtcgggcgagggggttacggcggagtagggtagcggatcgggttgaggagagtgcgtggacgtggtcggttggttgtatttgggttcggcgggcgtcgcgttggcgttggtagcgtagttgcgggcgcgtttttcggagttaaagtggtcggagttcgagcggtcgacgttgagatttatgttattgtagtcgtagtcgtatttgtcggagtgtatgttcgtcgagtttttgaattgttcgtttacggaattatgatttttataattatgtaattggtagttcgggttatttggatagcgatcgtaaaatgagtttataaaataagagtttatttgttttttgatatgtgtgtttgatttgtggttcgcggtcgtttgtgcgtttatagtatttttgtataatttatgatgaattatggaaatgattgggatatgtatttggtttttttttacgtaggtatttaaatatggggtacgatttcgaattacgtgtttttgttgtttagtcgtaaattttgtttgatgatttttagaggtaaattcgtgtattaataggggagttgggtggaggcgaggggggtggcgcgcgcgtttcgggcgcgtgttcgtcgttagttgtcgtcgtttagtcggattcgagcgttattcgttggaggtagggtttatcgtttagttttcgatcgggggttgtaagggtcggggtcgaattgaggttatagtttattatggtaaaattattgtatttttttcgtagttttattaggatgtattaattgttaggtcgttagttgtcgatcgcgcgttcggcgaggatgtagaggattggggggaggtggtgatttgtattttatttataataattttatttttttcgttttgtagttttttttatttttgtgtcgaggttggggtcggtattgatcgttttgttagtagttttgaattttgaaaatatagatattattttcggggaagggggaaagttatttagttaattggagaaataaattttgttcgtagtagtagtagttataattacggttttgtttttgcgagcgtatgagggatagtgtttttgtcgtttttaaatgataggcgtttattaaagatagtttttgtgtagtgtttttttaaggcgaggttaaattttatatatttttataatcgtagtcgatttttttttcgtgtgaatatggttttcgtgttattagtttgcgatttgatttgtttacgtatttagtttggaaaatttttattatagggttcggtttttcgagttagtcgggttttaagtcggagggttttttttgaatttagcgagtgggtttaggttttttgtagttatagaggttgtttggggtttggggattcgtggggcgggttattggggttttgtttagatttttaggagtaaaatgagggcgataatggaagtattttttggtagtgtttagtatttttgtagttattttttacggtttcgaaagatttaagtaaattataaatatagttgagaggtaagtggagttttttcgttggaggttcggcgttgtaggcgtttttggtacgtttggaagttaggattttggcggtttttatggttttgggtttttcgttgggttttgaacgttgttgtggcggcgacgcgggcgttatcggaggttgggagcgggaattcggagtcgggagtttatttcgggttgtaatgttttattcgcgtttaggttaattcgtttcggttgaggttgttttttttttattgacggttgtatacgcgggatcgagagattgggttttgttggggttttttttgtttttcgagttttttttttgttttgggaggcggtttgggaggtcgcgataaggtcgggt

SEQ ID NO: 648 - DNA, 2361 bp, Artificial Sequence
  chemically treated genomic DNA (Homo sapiens)
gttcggttttgtcgcggttttttaagtcgttttttagaataggaaggaagttcgaggaataaagggggttttaatagagtttagtttttcggtttcgcgtgtgtaatcgttagtggaagagaagtagttttagtcgaggcgagttaatttgggcgcgggtggaatattatagttcggggtaggttttcggtttcggattttcgtttttagttttcgatagcgttcgcgtcgtcgttatagtagcgtttaggatttaacgaggggtttagggttatgggagtcgttagagttttggtttttagacgtgttaggggcgtttgtaacgtcgggtttttagcggggagattttatttgttttttagttatatttgtgatttatttgagtttttcggagtcgtggaaaataattatagagatattaggtattgttaaggaatgtttttattatcgtttttattttatttttggaggtttaagtaagattttagtaattcgttttacggatttttagattttaggtagtttttgtggttgtagggagtttgggtttattcgttgggtttaaggagaatttttcgatttggggttcggttggttcgaggaatcggattttgtgatgaagattttttaggttggatacgtaagtaaattaaatcgtaaattaatgatacgaaaattatatttatacgaaagaaaaatcgattacggttataaaagtgtatggaatttgatttcgttttggagaaatattatataaaagttatttttaatagacgtttgttatttaagagcggtagggatattgttttttatgcgttcgtaaaaatagagtcgtaattgtagttgttgttgttgcgggtaggatttatttttttaattggttaaatggttttttttttttttcgaaggtgatatttgtatttttaaaatttagagttgttggtaggacggttagtatcgattttaatttcgatataaaaataagaggggttgtaaaacgggggaaataaagttgttgtaaataaaatgtaagttattatttttttttaattttttgtattttcgtcgggcgcgcgatcggtagttgacggtttaataattggtatattttaatggaattgcgagggaaatgtaataattttgttataatgggttgtaattttaattcgatttcggtttttgtagttttcggtcggaagttgggcgatgagttttgtttttagcgggtggcgttcgagttcggttgaacggcggtaattggcggcgggtacgcgttcggggcgcgcgcgttatttttttcgtttttatttaatttttttattagtgtacgagtttatttttagaggttattaggtaggatttacgattggataataaaagtacgtgattcgaagtcgtattttatatttgggtgtttacgtaggagggaattaagtatatgttttagttatttttataatttattataaattgtgtaagggtgttatagacgtataaacgatcgcgagttataaattaagtatatatattaaaaaataaatgagtttttattttgtaaatttattttgcggtcgttatttaaatggttcggattattagttgtataattatggagattatagtttcgtgagcgagtaatttagggattcggcgagtatgtatttcggtaggtacggttacggttataatggtatggattttagcgtcggtcgttcgggtttcggttattttggtttcggagagcgcgttcgtagttacgttgttagcgttagcgcggcgttcgtcgagtttaggtatagttagtcggttacgtttacgtattttttttagttcgattcgttgttttgtttcgtcgtggttttttcgttcggtagcgatagttattacggcgggaaaaattttttaagtaattttagcggcgtttcggtcgacgtcggtagtatttatattagtagtagagagggggttggtacggcgttcggagtcgaggaggacgtttttgttagtagcgagtaggcgagtgcgtagagcgagtcgagttcggcgtcgttcgtttaattttagatttatttttggatgcgtaagttgtatataagttatggtaaagttagtttttttttaaatttacgcgatcgcggggacgcggttttcggtttttttttttttttttgtcgtttttttttagttttttttggttttattttttttagttttgcggagttttttttgtcgtttttttttttttgttttttttttttttttttttttttgcgagtattttgcgtttataaatagtgggggaaatgggcgttttttgggatagtttagacgttggaagggggaggaagtaaaaaatttttt

SEQ ID NO: 649 - DNA, 2421 bp, Artificial Sequence
  chemically treated genomic DNA (Homo sapiens)
gttattttaattgtatgggagttttataatagtatagggagatatttttgattattatttttattaggagggtggagaaattgaggttttgggaggtggttttgatttagggaattaatttgttgatttattaatttatgaagttttatagttaaaaaagattagattaaaaaatgagaatttagtaaaggggttgaggtaggaggatcgtttgagtttagaaatttgagattagtttcggtaatatagtgagattttttttttagaaaaattttttaaaaaattaggtcgttcgaggtagagtgtagtggtttacgtttgtaatttaatattttaggaggttgaagagggtggattatttgaggttaggagttttagattagtttggttaatatggtgaaatttcgtttgtattaaaaatataaaattagtcggtgtggtggtatacgtttgtagttttagttatttaataggttgagataggagagttttttgaattcggtaggcggaggttgtagtgagtcgagatcgtgttattgtattttagtttgggtaagatagagcgagatttcgttttaaaaaatataaataaaataaataaataaaaaattaggttgttagtttagtggtttatggtttatatttgaaattttagtattttgggaggttaaggtaggaggatcgttttagtttaggagttcgagattaggttgggtaatatagggagatatagcgtttttattgtttttgttcgtttcgatttgtttttttataaaaaggtaaaagaaaaaaaaattagtttggcgtggtggtgtgtatttgtatttttagttattagagaggttggggttagaggatcgtttgagtttaggagttcgaggttgtagtgagttgtgatcgtattattgtattttagtttgggtgaaagagtgagattttatttttaaaacgaataaataaaaaattttaaaaaataaaagaatttagttaagtgtaaaagttttttttgattttaggttttagtgagttatcggcggggttgggattcgaatttagtggaattagaatcgtgtaggttttataatttatttagattttagtaattttaggttagagggttatcgcgtttatgcgaggtcgggtgggcgggtcgttagtttcgttttggggaggggttcgcgttgttgattggttgtggtcggtaggtgaatttttagttaattagcggtacggggggcggtgttttcggggtttatttggttgtagttacgtatttttttttagtggcgtcggaattgtaaagtatttgtgagtttgcggaagttagtttagattttagttcgttttagttcggttcgattcgatcgtattcggcgtttgttttcgttcggcgttttcggttagttatgggtttttggagtcgtagtttttcggcgttgttgttgttgttgtaggtatttcggattttttgatttgcgagggacgtattcgggtcgtaagtttcgcgttttagttttgcgtttttttttttttcgtcgttatcgtttttttttttttaagaaagttcgggttttgaggagcggagcggtttggaagtttcgcgcgtttcggattttttagtgatgggagtggggggtgggtggtgaggggcgagcgcggtttttttgttttttttagcgtagatcgaggcgggggcgtttggtcgcggagttcgcggggtgggttcgcgcgggcggtgggggcgtgaagcggggtgtagggggtggggtgtggagaaggggtgttttggtgtaagtcgagggggagttaggagtcgtggggacgattttcgagggaaggagaggggtattcgtagaaataaaggtatttgttatgttaagaaaggtcgtaaataggagtgagggtttcggggataagaaagtgaggtcggaggaggtgggagcgtttttcgttttgaggagtggtgtattttcggtttaaggaaagtggggtattggagaataaagatatttttaataaaatgagaaaggagattgaaagggaacggtgggttaggttttgagggggtgattcggcggttttttttcgggagtttttgggggttcggcggtcgtaggtttcggggtgggggagggtgacgtcgttgttcgttcgtttcggggttgcgggttggggtttttttttaatttcgacgtcgggagcgagggaggggcggcgttgttggtttcggtgagtaggagggaatttttcgagttattcggttttatttattttttttttattttaggtttttttttggttttgttaggagtcggagttttgttattttggttttgacgtcgagagttatacgtttacggtgtttcggcgttatttggagagaggtcgcgttttgggtagaggtgagggcgcgttgtcggt

SEQ ID NO: 650 - DNA, 2421 bp, Artificial Sequence
  chemically treated genomic DNA (Homo sapiens)
atcggtagcgcgtttttatttttgtttaggacgcggtttttttttaggtggcgtcggggtatcgtgaacgtgtagttttcggcgttaaagttagggtggtagggtttcggtttttggtagagttaagaggagatttggggtgggggaaaggtagatggaatcgggtgattcggagggtttttttttgtttatcgaaattaatagcgtcgtttttttttcgttttcggcgtcgggattgggggaggattttagttcgtagtttcgggacgggcgggtagcgacgttatttttttttatttcgaaatttacggtcgtcgagtttttaggaattttcgggagggggtcgtcgagttatttttttaagatttagtttatcgtttttttttagtttttttttttattttattggagatgtttttattttttagtattttattttttttagatcgggaatgtattattttttagagcgaggggcgtttttatttttttcgattttatttttttattttcgggatttttatttttatttacgattttttttggtatggtaggtgtttttatttttacggatgtttttttttttttttcgaagatcgtttttacgatttttggttttttttcgatttgtattagggtattttttttttatattttattttttatatttcgttttacgtttttatcgttcgcgcgagtttatttcgcggatttcgcggttagacgttttcgtttcggtttgcgttggagggggtaggaaagtcgcgttcgttttttattatttattttttatttttattattggggggttcggagcgcgcgaggtttttaggtcgtttcgttttttaggattcgaatttttttggaagaagggaagcggtgacgacgggagaggaaggggcgtagggttggggcgcggagtttgcggttcgaatgcgtttttcgtaagttaggggattcggggtatttgtagtagtagtagtagcgtcgagaggttgcggttttaagggtttatggttggtcggggacgtcgagcgagggtaggcgtcgggtgcggtcgggtcgggtcgggttggagcgggttggagtttgaattgattttcgtaagtttataggtgttttgtagtttcgacgttattgagagggggtgcgtggttgtagttaggtgagtttcggaggtatcgtttttcgtatcgttgattggttgagggtttatttgtcggttatagttaattagtagcgcggatttttttttagggcggagttgacggttcgtttattcggtttcgtatagacgcggtgattttttagtttggagttgttagggtttaggtgggttatgggatttgtacggttttgattttattgggttcgaattttagtttcgtcggtggtttattaagatttgggattagaaagggtttttatatttggttgagtttttttgttttttgggattttttgtttgttcgttttggagatggggttttatttttttatttaagttggagtgtagtggtgcgattatagtttattgtagtttcgaatttttgggtttaagcggttttttggttttagtttttttagtagttgggagtataggtgtatattattacgttaggttaattttttttttttttgtttttttgtagagagataagtcggggcggataggggtagtgggggcgttgtgtttttttgtattgtttagtttggtttcgaatttttgggttgaagcgatttttttgttttggttttttaaagtgttaggattttaggtgtgagttatgagttattgagttagtagtttaattttttgtttgtttgttttgtttgtattttttgagacggagtttcgttttgttttgtttaggttggagtgtagtggtacgatttcggtttattgtaattttcgtttgtcgggtttaagagatttttttgttttagtttattgagtagttgggattataggcgtgtgttattatatcggttaattttgtatttttagtatagacggggttttattatgttggttaggttggtttggaatttttgattttaggtgatttattttttttagttttttgaagtgttggattataggcgtgagttattgtattttgtttcgagcggtttaattttttaaaaaatttttttagagaggggattttattatgttgtcgaggttgattttaaatttttgaatttaggcgatttttttgttttagtttttttattgagtttttattttttaatttagttttttttaattgtagagttttatgggttagtgagttagtaaattgattttttaggttaggattattttttaaagttttagtttttttatttttttaatgggaataatgattagaaatgtttttttatgttgttgtgggatttttatataattaaaatgat

SEQ ID NO: 651 - DNA, 2251 bp, Artificial Sequence
  chemically treated genomic DNA (Homo sapiens)
ttataattaagtaatttagaaaaagaaatgtaggcggagaatagtagtttttttttgttaagtaagaggaatcggtttaaaggatatttttttttttttttttttttttttatcgggtgaatagtgagttgtttcggtaaaaagaaatcggaaatgttgttgtaagaggtagaaatgtaaatgtggagttaaataataatagggttgtcgggttttttagattgcgacggtttttttcggtttggcgggtaaatttttggtttagtattttttatttttacgattgatagtttttaattggattttttttatttagcggagtcgggggttgtttggaaagatcgttttaggaaggataaaggttcggaagttgtgggattttagtagtttgggtttttcggattatttttaaatgattatttcggaatggagttttagtttttattaggatgttatgggttttaaaatatatagttatgagtttttaatgtttcgagatttaaaagttttagattttaatgttttgtgtattttttattttagggattttttacgtttagtatcgggtggatgtgtaaagaagtacgttttaggtcggtttaaggttttttaaagttttatttttttgtttaggcgtttaattttgagttcggatggttttaatatttttattatttatatttaggttttttaataatgtaatttttatgatgatttttttagttaagtttttattttatttatttttaaattcgttaagtttttattgttttatttttagttttagcgattttttcgagttgaaaatatacggagtcgagagttcgtgatttagagaggatttattaagtttagttaggagtttatttaatttagggaagcgtgttatcgtcgtggaaagtacgtttttagttcgaacgtaaagtgttttcggagtttagtagttatttgttttttggacggtggttttagatttttgagaagtttaaaatttttagcgttagttttgagtatatgggaggggaaaattttaattttattaatttttgcgaggtttttggtataaagttggatagtcgttatgataagtaagggtaagtaattcgtttgtcggaggaagtaaaggaaatggagttggggaggagggtgtagagttaggattttcgtcgatttggtgtcgtagatattaatattttggggtggaaaattttgtaagttagagttgtgagggtagaattggtggaaattattttggaggaattttgtattgtgttaaatatgaagggtggaaggaagaaagtttttgcgtttgtttttagttggattttttttttttattagttaaaatgttattttttaggaaggtttttcgtaatattatattttaacgtttttttttagatattttatattatattattttatttaattttttttataatttttattattttgataagatttatttgtttattgtttttagtatatggaaacgtaagttttatgaggatatagaatttttttattattttatttattgttgtatttttgagtgtttatattagtgttgggtagtaagtaagagttcgataataaatattttttgaatgagggagataggtttgaagtttggagaatgagatgtagaagaggtgtaagatttgttgcgttttttgtaggcggcgggggggcggtgtaggtgttttaagaattatcgcgggattcggtagggggagcgtaggcgtttttcgttaagatagaagcgtttagattataatttttagtagttacgaggagttttagggtttgatgggaacgggaaattttttaattttttacgtttcggtttcgcgggtttcgtgggtcgttcgcgaaatttgattcgggatgcggcggtttaatcggaaggtggatcgaaatttcgcgatagtaagaggttcgtagcgattcgcggtgttaaggaatatagtgtttttaaaagaattggcgttcgttgttcgttttttttttcgggagttttttgtttatttttagaagaggagggaagtataggtgggtttttttagttttgcgtcggatttttgagaatttcgaagttattttggttgaggttaattttcgttgtgttttttttgtagtatgaagattttggagatttaatcgttagtttcggattgttgttttttagattaggatttagttttagtttatttttttttttacgttttttcgatgaataaaaatgcggatt

SEQ ID NO: 652 - DNA, 2251 bp, Artificial Sequence
  chemically treated genomic DNA (Homo sapiens)
agttcgtatttttatttatcggggaagcgtggggagaaggatgggttggagttgggttttggtttgaaggatagtagttcggagttaacggttgagtttttaaagtttttatattgtagaggaagtatagcggagattagttttagttaggatggtttcgaagtttttagggattcgacgtagagttaaagaaatttatttgtgtttttttttttttttgggagtaggtagaagattttcgggaggagaggcgaatagcggacgttaatttttttgaaagtattgtgttttttagtatcgcgggtcgttacgggttttttgttgtcgcgggatttcggtttatttttcgattgggtcgtcgtatttcggattagatttcgcgggcgatttacggaattcgcggagtcgggacgtgaaaggttagaaggtttttcgtttttattaagttttagggtttttcgtggttgttgggagttgtagtttgaacgtttttattttggcgagaagcgtttacgttttttttatcgagtttcgcggtaatttttaaagtatttgtatcgttttttcgtcgtttgtagagggcgtagtaggttttgtattttttttgtattttattttttaggttttagatttgttttttttatttaaaaaatatttattatcgagtttttatttgttatttagtattgatataggtatttaggaatataataatgaataagatagtagaaaaattttatatttttataaggtttacgtttttatgtattgaaagtaatgaataaataaattttattagagtgataagggttgtgaaggagattaaataagatggtgtgatataaagtatttgggagaaaacgttagggtgtgatattacggaaagtttttttaaaaaatgatattttaattgatgagaagaaaggatttagttgagagtaaacgtaaaagtttttttttttttattttttatatttgatataatgtaggatttttttaaaatgatttttattaattttgtttttatagttttggtttgtagaattttttattttaaaatgttagtatttacggtattaggtcggcgagaattttgattttgtatttttttttttaattttattttttttgtttttttcggtaggcggattatttgtttttatttgttatggcgattgtttagttttgtgttaggagtttcgtaggggttgatgggattggggttttttttttttatgtgtttaagattggcgttaaaagttttgagttttttaaaagtttagagttatcgtttagggagtaggtagttgttgggtttcggggatattttgcgttcgggttgggagcgtgttttttacgacggtgatacgtttttttggattgggtaagtttttgattgaatttgatgagttttttttgagttacgggttttcggtttcgtgtatttttagttcgggaaaatcgttggggttgggggtggggtagtggggatttagcgagtttgggggtgagtgggatggaagtttggttagagggattattataggagttgtattgttgggagatttgggtgtagatgatggggatgttaggattattcgaatttaaagttgaacgtttaggtagaggagtggagttttggggaattttgagtcggtttaaagcgtatttttttgtatatttattcggtgttgggcgtagggaatttttgaaataaaagatgtataaagtattgaggtttgagatttttggatttcgaaatattgagaatttatagttgtatattttagagtttatggtattttagtgaaaattggggttttatttcgaaatgattatttgggggtgattcggggagtttaagttgttaaggttttataattttcggatttttgttttttttggagcgatttttttaggtagttttcggtttcgttagatggagaaaatttaattgaaggttgttagtcgtggaagtgagaagtgttaaattaggggtttgttcgttaggtcgaggaggatcgtcgtaatttgagaggttcggtagttttgttattgtttggttttatatttatatttttgttttttgtagtagtattttcggtttttttttgtcggagtagtttattatttattcgatgagaggggaggagagagagagaaaatgttttttaggtcggttttttttatttggtagagggaggttgttatttttcgtttgtatttttttttttggattatttagttatgg

SEQ ID NO: 653 - DNA, 2497 bp, Artificial Sequence
  chemically treated genomic DNA (Homo sapiens)
tttaggaagttagagttatgttggtttgggatagtggtttggagattagattttaatgatagaagtattaggtagcggtatttatggtaatgtgtgtatttatagaaatgtaatttatatttcgggtttaggagtcgaaaaatgaaaagaacgtttagggaggaaaaagggaaatataataataggtagagagtaatttattattttatgggtttgttttgtaaatagttgaagattttggagttagatggttttgtaaattttttaaataggagttacgttaagaagtacgagtgggtataaaaattgttttttaagatataattttaatttggtttgtggaaattggatacgagtaagtttttttaaaattcgagtagaaagtagttgtttttttcgggttttttgatgagaatacgtatatcgtttttaagcggtcggtcgagggagcgtcgcggtagcgggagaggcgtttttgtgggttttttggtagtcgcggtaggaaagggttcgaaggtagcgaaggcgaacgcggcgtattaatttgtcggtttcgtcgacgtcgcgtttattttttttcggggcgggcgtggggttagtttaggataggcgttcgggggacgcgtgtttttattttacggggacggtggaggagagttagcgagggttcgaggggtaggtattttaacgaatggtttttttggtgttttttgcgtttcgtcggtttatttttttttttataaaacgggtttagtttttagtatttatttttcgttattaattaggtatttcgggagattagttcgttcgaaagtttttgcgttatttcgcgggtttttttaggtggtttttttagtttcgttttttttcgggatgtttgttgattatttcgagttcgcgtggcgtaagagtacgagcgtcgagttcgtgcgcgttaaggttgcgtgggcgggtatcgatttttttgagaagttttagtgtttttaagtttcgattttcgttttttttattttttagttggaaagttgcgcgttaggtagcggggggcggagagaggagtttagattggtttttatttttcgttttttgttcggtcgtcgtttattggtcggaggaatttttaggaatgcgagcgtttttttaaaagcgcgcggttttttcgttttgttagtcgttgcgttcgagttggtttgcgagtttagggtttttgtcgttttttaggagtaatttttatttcggacgtataggtatttttcgcgtttttttagttttcgtcgttttcgttatcgttttcggtcgtcgcgtttcggtatatataggtaagtcgttttcggcggtcgtcgaggattaaagttgttcgggatatttatttggagcgttgaggttttagtttttttggtggatttcggaatttatatttttttcgttcgtttattttagttcgttttttttagtcgttggaggattttttagggtaaggttttagagttattttttttagttttgaggtttataaattaatttattaggatattttaagatttttttattttttgaagttttttttaagtttttgtattagtattttagggaagagtttgtattttttttgttttttttgtaattttaaattatagtttttgattttgtttattttcgattttttaaaagtttttaaattgttggttttgcgttttttatattttaaaattagtattttttttttttattttttttttttttttttttttttttttttatgttttttggaaagtaattttgttgttttttattttagtaaacgcggggttaaagagggatggtttcggttttgtttttatgtttagtttcgtttttgcgtatcgtttttttttgtttagttgatttttgattttcggtttttgtgttttttgttataggatttttgttgggtattaatagttttattatggggttggtttggggattaggcgttttgtttttgatgtatgtgtgtggtattaatcgtattttaggtgagtttgtgtggtatttttaggggaaggagggataaggaagaggtgttggttattttaggtgtgtttttttacgtgttgtttttttttttttgagtttgattggatattaggacgtagttttattttgattttggtatttatttattttttttagtggttgttaggagtttttattttaattttttgtttttatttttaaggatttagttttttattgttggttttagtttagaaagtttattttgtgtttttttttgtttaatagagtttggcggagataatagcgtgtttgatatttttgaatttatcggggtcgttcgtaaggggtttgggcgtcgattggtgaagggtttcgatttttttagtttagtttttcgtatcgaggatgttaatttgattttttttgtgtttgatgataagttttaagatttggtggatgttgtgcgggtagaaaagggttttttttttttggtattttt

SEQ ID NO: 654 - DNA, 2497 bp, Artificial Sequence
  chemically treated genomic DNA (Homo sapiens)
agggatgttagaaggaggaaatttttttttgttcgtatagtatttattaggttttggaatttgttattaggtataggggggattaggttggtattttcgatgcggaaagttgggttggaagggtcggggttttttattagtcggcgtttagattttttgcgggcggtttcggtgagtttaaagatgttaaatacgttgttgttttcgttagattttgttagataggagagaatataaagtgagttttttaggttgggattagtagtagggggttgagtttttaggggtggagataaagggttggggtgaaaatttttggtaattattgaaagaggtgaataaatattaggattagagtgaagttgcgttttgatgtttagttaggtttaagagggagaggatagtacgtgagggggtatatttgggatagttagtattttttttttgttttttttttttttaaaggtgttatataaatttatttggaatgcggttggtgttatatatatgtattaggaataggacgtttagtttttaggttagttttatggtggagttgttggtgtttagtagggattttgtagtaggaagtataagagtcgagggttagagattagttaggtagggagggacggtgcgtagaaacggggttgggtatggggatagggtcgggattatttttttttgatttcgcgtttgttgaaatgaaggataataggattattttttagagagtatgagagagagagagagagagagagagagaggtggaggaaagagatgttggttttaaagtgtggggggcgtaagattaataatttgggggtttttgggaagtcgaaggtgagtaagattaggaattgtagtttggggttgtagggagggtaggggaagtatagatttttttttggagtgttgatataaaggtttaaggaggattttagagagtaaggaaattttggggtgttttgatgagttggtttgtgaattttaaggttggagaggatggttttggagttttgttttgaagagttttttagcggttgagaggagcgggttggggtaggcgagcggggagagtgtaggtttcggggtttattagagggattgaagttttagcgttttaggtggatgtttcgggtagttttggttttcggcggtcgtcgggggcgatttatttgtgtgtatcggagcgcggcggtcgggagcggtggcgagggcggcgagggttggaggggcgcggggaatgtttgtgcgttcggagtagaggttgtttttggagagcgataggagttttgaattcgtaggttagttcgggcgtagcggttggtaaggcggaggagtcgcgcgtttttaaaggggcgttcgtatttttggggattttttcggttaatgggcggcggtcgggtaggaagcgggaggtgggggttagtttgggttttttttttcgtttttcgttgtttggcgcgtaattttttagttagaaagtgaagggggcgggggtcggggtttgggagtattagaattttttagaaaagtcggtgttcgtttacgtagttttggcgcgtacgggttcggcgttcgtatttttgcgttacgcgggttcggggtgattagtaagtatttcgaaaagggacggggttggggagattatttaggagggttcgcggggtggcgtaggggttttcgggcgagttgatttttcggaatgtttggttgatggcgagaggtggatattagagattgggttcgttttgtaaaaagaaaaatgggtcgacggggcgtaggggatattaagagagttattcgttaaagtatttgtttttcgggttttcgttgatttttttttatcgttttcgtggggtgaggatacgcgtttttcgagcgtttgttttgagttggttttacgttcgtttcggagggaggtgagcgcggcgtcggcggggtcggtaggttggtgcgtcgcgttcgttttcgttgttttcgggtttttttttgtcgcggttgttagggggtttatagagacgtttttttcgttgtcgcggcgttttttcggtcggtcgtttgggggcggtgtgcgtatttttattaaggggttcggggaggatagttgttttttattcgaattttaaggaaatttattcgtatttagtttttataagttaaattgaaattgtgttttgaaaaatagtttttgtgtttattcgtgttttttaacgtgatttttgtttggagaatttgtagaattatttggttttagagtttttagttatttatagagtagatttatagagtaataaattattttttgtttattattgtattttttttttttttttttaaacgttttttttatttttcggtttttgaattcgaggtgtgggttatatttttgtgggtgtatatattgttatgagtgtcgttgtttagtgtttttgttattgaagtttggtttttaagttattgttttaagttagtatgattttagttttttgga

SEQ ID NO: 655 - DNA, 2451 bp, Artificial Sequence
  chemically treated genomic DNA (Homo sapiens)
tgacgtgtagcgggagttttagaaagcgtggtcgaatttgtagtttttaataaatggttcgtttttaaattttagttttaattttttttgagcgataggggtatgttattagtacggggggaaatgagatataagaaacgttcgaaagggaaaaataaggttgggttgttttttttttttggggttaagatagaggtatagaaggtttaggtttgggaggttggattattttcggttggatgttgagtcgggtgggagtttaaatagtagggggtttataggaggtcggtttaggtagtttcgcgtttatttattaggttaggtttaggtacgtttttagcgatagtaggtttaggtacgttcgggggtttgtttagttttcgttttcgttgtttcgggttacgggggttttttcgttttcgtttcgtttttcgggtttcgtagtaggggtttttttgggtttcgatttttttcggttttttattttagatatgtttggagattttaggacgataagtttagggtagtttttttattagggggagtaggacgtggtcgttttggcgttcgtgggaattttgggcggtgatcgcgtttttttatagatttggtatcgtttagagtttagtttttttttttttttcggtattttcgttgttttattgagttttttagttgttagttttatagtttttttaggagaggtgggcggcgattttaatttatagcgttttttattgcgatattgttttaaattcgaggaaatttaaattttcgggcgcgcgtaggtcgacgggattcgaggaggaggggtaggacgaaggggtcgcgcgcgttacgtcgggcgcgtcgtcgttgttcgagttcggtattggtgggaacgcggcgcgtttttgaggtttagttacgtttcgttcgcggggtaggcgggtatttttacgcgcgcgggtatgagtcgtggtaggagtgcgcggcggtagcggtggtcgttttttggggtttggggtgtgtttatttgtataagcgggcgcgcgtcgttcgggttgggtggattcggcgggatttgattgtttcgttgtttagaggcggagaagaagaggtagcgagtggacgtgattgttttatttcgggtaaaagggatagaattagaggtggggagtttgggtagtcggcgattcgcgaagatttgaggtgtcgtagcggtattcggagtagcgtcgggtttttttcggggtgtagtcgtcgtcgggggaagggcgttataggtcgggaagattttttttttttgtgtttagtagtggggtttatcggagggcggttcgtgggtcgggttttatcgcggcgtttcgggattgtggggttaggttgcgttgggtggacgtttatttcgttaattttcggaggtttttgggggttttcgtgcgtttcggggttgtagagatttaggggaggcgtttgtgaggttcggatttgtttcggggcgaagggtatgtggcgagatagagttttgtatttttaattttcggtggaaaatttttgttgtcgtttttttttatcggtttggagttttttagttttgtttcggtagtgtcgttttttttattaagatttaggcgtaaaggtttgggtaagttgattttttcgttttttttttcgagttaggttttttggaggtttggtagttgattttagggattgagaatttgaggatatggaatatttgataattattttgtttttgtattaggaagagaaattttgtaatgaggaagtagtaaatttggggttttcgtggataaacgtgcgttgttttttgttttacgtttatgaagagttttggttttttattttgttgtgggttataaaaggttttgagatttagtttagataagttgtgtagttttaaaacgtatttaagatttgtatattttagtttaataggattaggtgaaattggaaattagttttagaaaattagagtgttttatttgtttagttattggatattatttaaaaaatttatttatttttgtttttttatatcgaattttattattataaattaaggaatattttatgtttaagaggataaaaacgttattaatattttaaaaaatgagagttttgattcgaattaataattttttattagttttgtgtttttgttgggtattttgtaagttttgataagtataggtaaatgttttacgttcgtttttgtttttttaagtgttatatttggtgattttaaaaatagttattgaagtttgataattattgtttttttttgtgagttttaagttatttgtgttttgtttttgtatttcgggtatttatatttttatttttttttttttttttttttttgagtagattgtgaattattttaggtaaatgatttaattttttttgtagttttggtgtttgatatatagggaggggtataaatgt

SEQ ID NO: 656 - DNA, 2451 bp, Artificial Sequence
  chemically treated genomic DNA (Homo sapiens)
atatttgtgtttttttttatatgttagatattaagattatagaaaagattgagttatttgtttgaaataatttatagtttatttaaagaagaaaaagagagagagagtgggaatgtgaatgttcgaagtgtaaaaatagagtataagtaatttggagtttatagaagggggtaataattattaagttttaatgattgtttttgaagttattaaatgtagtatttggaaaaatagggacggacgtagggtatttgtttatgtttgttaaggtttataaaatgtttagtaggggtataaaattgataaaaagttattgattcgaattaaaatttttattttttaaaatgttaataacgtttttgtttttttaaatataaaatgttttttaatttatagtaatgaaattcgatgtgaaaaaataagaatgaatgaattttttaggtgatgtttaatagttaagtaaataagatattttggttttttgaaattaatttttaattttatttagttttgttaaattaaaatatgtaaattttaaatacgttttaaaattgtataatttatttgaattaagttttaaaattttttgtaatttataataaaatggaaagttaaaattttttatggacgtaaaatagaaaatagcgtacgtttatttacgaaaattttaagtttattatttttttattatagaatttttttttttggtataggagtaggatggttattaaatattttatgtttttaaatttttagtttttgaaattagttattaagtttttaaagaatttggttcggggagaaaagcgaggaggttaatttatttaagtttttgcgtttaggttttagtggggagggcggtattgtcgggataagattgggagattttaggtcggtggagggaaacggtaataggagttttttatcgggaattaggggtgtagggttttgtttcgttatatatttttcgtttcggggtaggttcgggttttataggcgttttttttggatttttgtagtttcggggcgtacgaagatttttagggattttcgaaggttggcgaggtgggcgtttatttaacgtagtttgattttatagtttcggagcgtcgcggtgaggttcggtttacgggtcgtttttcggtggattttattattggatataaagggaggaggttttttcggtttgtggcgtttttttttcgacggcggttgtatttcggagggagttcggcgttatttcggatgtcgttgcggtattttaagttttcgcgggtcgtcgattgtttagattttttatttttggttttattttttttgttcgggatagagtagttacgtttattcgttattttttttttttcgtttttggatagcggagtagttaaatttcgtcggatttatttagttcggacggcgcgcgttcgtttatgtaaataaatatattttaagttttaaggggcggttatcgttgtcgtcgcgtatttttgttacggtttatgttcgcgcgcgtagaagtgttcgtttatttcgcggacggggcgtggttaagttttagggacgcgtcgcgtttttattaatgtcggattcgggtagcggcggcgcgttcgacgtggcgcgcgcgattttttcgttttgtttttttttttcgggtttcgtcggtttgcgcgcgttcgggagtttgaattttttcggatttggagtaatatcgtagtggaaggcgttgtgggttgaggtcgtcgtttattttttttaggggaattatggagttggtagttgaaagatttagtgaagtaacgaggatgtcggggagagggaaggggttgggttttgggcggtgttaagtttgtgagggggcgcggttatcgtttagggtttttacgaacgttaaggcggttacgttttgttttttttggtgaagaagttgttttgggtttgtcgttttagggtttttagatatgtttgaggtgaagagtcggaagaagtcggggtttaagggagtttttgttgcggagttcgggaagcggagcgagggcgggaagattttcgtggttcggagtagcggaggcgggggttgggtagattttcgaacgtgtttgagtttgttgtcgttggggacgtgtttgggtttggtttggtaagtggacgcgaggttgtttgggtcggttttttgtgggttttttgttgtttgggtttttattcggtttaatatttagtcggaggtgatttaattttttagatttgggttttttgtgtttttgttttgattttaaaggaaggaaatagtttagttttgtttttttttttcgggcgttttttgtattttattttttttcgtgttggtagtatgtttttatcgtttagaaggagttgaggttaaggtttgggaacgagttatttgttaagagttgtagattcggttacgttttttgaagttttcgttatacgtta

SEQ ID NO: 657 - DNA, 2347 bp, Artificial Sequence
  chemically treated genomic DNA (Homo sapiens)
cgagattgaggtattggcgggtgcggtcgttatcgtcgttttttcgggtttggatggggtcgttcgcggcggtagcgggggcggtggttttaacgggaaattcgggaaggttgcggggttggtatcggttataaggtaggaacgcggggagcgcgcggaggttttcgcgttttttttttttttttttatttttagagcgggcggttggaagtcgttatagagagggtacgcgtcgtttttgggttcggcgtcgggcgggtacgcgtagtcggggaagtcgtttatagcgatcggggtggacgaggtatagggtgaatttcgcggcggggtaaaggcgttggtagtttcggtttcgtcgtcgtaattttcgttttttagtagttgtcgagtgcgggttgttaataaggcgtgattgagaggtaggataggtacgtggatgaaatttattatcgtggtggttagcggggagcgttcgggcgttatcggcgcgttttgttttattagggcgattttgggcgttgagaagcgggaattttttttggggattagggcgacgttttttgttgtcgttttcggcgggatagtcgcggttttttttttagtcgtcgcgttatttagagttcgaggtttgttttttagaagcggattcgtagatttttcggatttagagttatttttttttttaatttttatcgtagcggtttgcggagacggttttattggggtttcggattagtgagggtttttagaggtcgggagtagtagttgtcgggttggtgataggtttcggggtagtattttatgggtagttgtcgtttcggagttgtttttaattttgtattcggatcggtttatgagcggggataatattcgttgggtggcgggggtagtcggtggattttcgggaagttcggggttaaataggtattaagagttggtgatttcgtaggcgggagggttgggttggttttgttcgggatttgagggcgttaatagagtgtttaagatattgtttagtagttcgttgtttttttttgggggattagaattgttgtttttagtattttttgtagttttagttttggaatatgcgttttttacgttcgatagcgattgttggttttgcgttttttcgtcggaggggttttgtttttggtagggtcgagggaagagtagttcgtttagggagataggtatggtcgaaattttaggtaaggtgttcgaggtttggtttttcgggaacggatttgcggttgggcgatatagtagtggggattcgatttcgggggagggcgggtcgttcgttacgtggggagttcggggattttttgtttttagtttagttatgacgattggatttttttttttttttttttcgtttttaggaggagggaaaagggaaggaggagggggtttcgggaatataggggtagagggaggagaaagtgggtgttgaatgtggttggatcggagggatttttattttttgggtcgggggcgggggagggcggcgttggttagtttttgtttttggtttttattttgtcgttaggggaattgtggttgtcgtttgttttagcgagcggtaagtggggagcgtaagaaaaagtagtaattgttaggagatttcgttttttaattcggggagttttttaagagagttttttaatttttgttcgaggattggagacgtagagtatttataagttcggtatttgagtggttgcggttgcgacggtaatttagtgatacgcggtttttttatttttcgattttttttttggtattaaattcgtgtatgttgtgaagtttttagtttttcgttgagttttattgtttttttattaaaattttggggttagtcggatttttcggtatagtttatttttaggaagggtcggatttttgttggtttcgtattgcgggcgatagttattttcgaagattttagattttagtagtgcgggagtattagtcgtttcgggttgtagattttatttaaatgataagtgaagttagtttttattgagaatgttatttatacgtataaatataataaggtttatttcgattagtgatagttgtggattggttagatagttttttaataacgtttttttttttagggaggtttcgtttaaagtttttttttattttaattatcggtaggatttgaaattttggagttggtatttttattcgttattttgaatgttatttttaatagtaggttttttgggatggaattttataagtatattacgttttgttttgtaaattaagaattatgttttatttaattggaaaaatgaatagattttattagaagtagaatttttgttattat

SEQ ID NO: 658 - DNA, 2347 bp, Artificial Sequence
  chemically treated genomic DNA (Homo sapiens)
atggtgataaaaattttatttttgatagaatttatttatttttttaattagatagggtataatttttaatttgtaaaataaaacgtaatatgtttatgaggttttattttaaagaatttgttattgagagtagtatttagaataacgggtggaaatgttaattttagagttttagattttatcggtaattggggtagggaggggttttgggcggggtttttttagaggaggaggcgttgttagaaagttgtttggttagtttatagttgttattaatcggggtaagttttgttgtatttgtgcgtgtgggtggtatttttaatgagaattagttttatttgttatttgagtgaaatttataattcgaggcggttagtgttttcgtattattgggatttgagattttcggagatgattgtcgttcgtagtacggagttagtagaagttcgattttttttgggaatgggttgtatcgagaggttcgattagttttagggttttagtgagggggtagtggaatttagcgagggattgagagttttatagtatgtacgagtttgatgttagagaaaaagtcgggagataaaggagtcgcgtgttattaaattgtcgtcgtagtcgtagttatttaagtgtcggatttgtgagtattttgcgtttttagttttcggatagaagttggagaatttttttggagaatttttcgagttaggagacgagattttttaataattattatttttttttgcgttttttatttgtcgttcgttgggataaacgatagttatagtttttttgacgataggatggaggttaagggtaggagttgattagcgtcgttttttttcgttttcgatttaggaggtggagattttttcggtttagttatatttaatatttatttttttttttttttgtttttatattttcgaaattttttttttttttttttttttttttttttggagacgggggaggagaaaaggggagtttagtcgttatgattgagttgaaggtaaagggttttcgggttttttacgtggcgggcggttcgttttttttcgaggtcggatttttattgttgtgtcgtttagtcgtaggttcgttttcggggagttagatttcggatattttgtttgaagtttcggttatatttatttttttggacgggttatttttttttcggttttgttagggataggattttttcgacgaaaagacgtaggattagtagtcgttgtcggacgtggagggcgtatattttagagttgaagttataaggggtgttggaggtagtagttttagttttttagaaaaggatagcggattgttggatagtgttttggatattttgttggcgtttttaggtttcgggtagagttaatttagttttttcgtttgcgaggttattagtttttggtgtttgtttggtttcgaatttttcgaagatttatcggttgttttcgttatttagcgggtgttgttttcgtttatgagtcggttcgggtgtaaggttggagatagtttcgggacggtagttgtttataaagtgttgtttcggggtttgttattagttcggtagttgttgttttcggtttttgagagtttttattggttcggggttttagtgaagtcgttttcgtaggtcgttgcggtggaggttgaggaggaggatggttttgagttcgaggagtttgcgggttcgtttttgaagggtaaatttcgggttttgggtggcgcggcggttggaggaggagtcgcggttgtttcgtcgggggcggtagtaggaggcgtcgttttggtttttaaggaagattttcgttttttagcgtttagggtcgttttggtggagtaggacgcgtcgatggcgttcgggcgtttttcgttggttattacggtgatggattttatttacgtgtttattttgttttttaattacgttttattggtagttcgtattcggtagttgttggaagacgaaagttacgacggcggggtcggggttgttagcgtttttgtttcgtcgcggagtttattttgtgtttcgtttatttcggtcgttgtaggcgattttttcgattgcgcgtattcgttcgacgtcgagtttaaggacgacgcgtattttttttatagcgatttttagtcgttcgttttaaagataaaggaggaggaggaaggcgcggaggttttcgcgcgtttttcgcgtttttattttgtggtcggtgttaatttcgtagttttttcggatttttcgttggggttatcgttttcgttgtcgtcgcgagcgattttatttagattcggggaagcggcggtgacggtcgtattcgttagtgttttagtttcg

SEQ ID NO: 659 - DNA, 2364 bp, Artificial Sequence
  chemically treated genomic DNA (Homo sapiens)
atattgtgtataaaaagattagatttaggatgatttggtgggattgttaggggttgatcggagtgttgttgggaaggagttttagtttcgttttaggttttttattaggtaggattgggatttttttagggtttggaggagtaagtttttgtaggtttagttttaggttggtgtgaaattgaagagttttcgtattttgtttgggttggtgggttcggttcgtattgtttggtattgtttattcgttaggattttttcgtatagagtatttagtagttatttaacgtttgtgattttcgcgataagcgtagttcggtgttggtttataaagtgtaggtttgggggtgggaggagaatatgagttagtagttagggtgtggggtttgtttttgttgaatttgagttttttaggaatttttttgtaagtttaggggtagggttttagggggcggttattaggattttatatgtagtgggatgagggtaatattgttttttttttttcgtagggtgtgggttggtgggtggggtgcgtagggttgttaagtcgtgtttgttttgttttgttttgttttggttgcgggagtatagatgtaggttgtgtaggagtgcggtggggtcgggttgggtgtggaggttttatttggtttggttgtcgattgaggaggggtttggattttagttggcgcggttttagagtttggaaggatatgggttaagtgatttttttttttttttttttcgtcgtggggtcggggtttcgttggtcggtaggttaagcgtggggagtttttttttcggtagagtagttttgtttaggggtaggaggaatagaaagcggaagagttcgcggggtaagcgttggtgtgggtggaggggaaagacggggtggaggggaacgggggcggtttattttggtgcgtggtcgtttgtagttgttcggttattttttgtaggtttatgtcgcgtagtacgttagcggtgagttcggcgtcgtaggtttttaggtagaagttgattagtttgtcggtgaggtttaaggcgtttatggatagtagcgcgtttcgcgggatgcgttcgtagttttcgcgtagcggtatcgatagtagttttagtttgaattttttgagtttttcggcggttaggttttttagcgtatttaggatggcgtcgcgcgcgcgttttatggttttaggattttcggtcgttgtcgtcgtttatttcgttgtagtcgtcgattaggaggaagtcggtttcggggcggaatttggatttttcgttttttttttattttggtttttcgatttttcgtttcggttcgttgttttttagtaaaaggcgtttttttattatatttttggtttttttttatttaggtttttggattggggttttaggtcgtcgggggacgttaggatcgcgttttttagttggtttgcgaggtgggattcgggagggggtcgtagaggggtttatgggtggcgtttgtttgtttttgggtttgtattagcgggtatagatcggaaatttgggttggtttttattgggtttattggagtatttaggtttagaatttcggatttttagaatttcgaaattttcgcggtttttcgaattttaggatttttttttatatgtcgtagaattttggaattatgatagttagaagcgtgaagtttttttaattttatatattggggaaaaatgagttgtataaaagggtagagagtgtaaatttttttgagttttagttttattttttacgatatggggataatttttcggtgtttataaatattttagtataatatggttaattcgatggttttcgaaattttgttagatgttttttaggggagttagaatttgattttaatattgattaaaaaaaagaaaaaagaaagagagatagtttttaggagattaaagattatgaatttgaagttatatagttttttgtttgaattttgattttattttttaagggggatatttggaattttttattttttttttttatttgggttgtaataattattgttttttgtagttatacgattttgatatattatacgtttatatgtttattggatatttatttttttttaaaatgtgaggtttatgagtatcggagattttaattgttttattttttgttgaatttttagcgttaagaatgtatttggaaatagttgtgtgtggtggagggcgtttgtaattttagttattagggcggttgaggtatgagaatcgtttgaatttcggaggtagaggttatagtgagttaagattgtattattgtattttagtttgggtgatagagttagattttatttgaaaaaaaaaaatgtatttggaatatat

SEQ ID NO: 660 - DNA, 2364 bp, Artificial Sequence
  chemically treated genomic DNA (Homo sapiens)
atgtgttttagatatattttttttttttagatggaatttagttttgttatttaggttggagtgtagtggtgtaattttggtttattgtagtttttgttttcgaggtttaagcgatttttatgttttagtcgttttagtagttaggattataggcgttttttattatatatagttatttttaggtatatttttgacgttaggaatttagtaaagaataagatagttaaggttttcgatgtttataggttttatattttagagagggatgaatgtttaataagtatataaacgtataatatgttagggtcgtatgattataaggaatagtgattgttataatttagatgagagggaaaaataaaggattttaaatattttttttgggaagtagagttaggatttaaataaagaattgtatggttttaagtttatggtttttaattttttggaggttgtttttttttttttttttttttttttaattagtgttgggattaaattttggtttttttaggaagtatttggtaaggtttcgggagttatcgggttggttatgttatgttggaatatttataagtatcggagggttatttttatgtcgtagaaaatgaaattgaagtttagagagatttgtattttttgtttttttgtataatttatttttttttagtatgtggaattgagggagttttacgtttttagttgttatgattttaagattttacgatatgtgggagaggattttaaggttcggggaatcgcggaggtttcggggttttagaaattcgaggttttaagtttaggtgttttaataaatttagtgagagttagtttaggttttcggtttgtattcgttggtgtaagtttagagataagtaggcgttatttatgagtttttttgcggttttttttcgggttttatttcgtaggttagttggagggcgcgattttggcgtttttcgacggtttggggttttaatttagaggtttgggtgggaggggattaagggtgtagtaaggaagcgttttttgttggagggtaacggatcggggcggggagtcgggagattagagtgggaggaaggcggggagtttaggtttcgtttcggagtcgatttttttttggtcggcggttgtagcggggtgagcggcggtagcggtcggggattttggagttatggggcgcgcgcgcgacgttattttggatgcgttggagaatttgatcgtcgaggagtttaagaagtttaagttgaagttgttgtcggtgtcgttgcgcgagggttacgggcgtatttcgcggggcgcgttgttgtttatggacgttttggattttatcgataagttggttagtttttatttggagatttacggcgtcgagtttatcgttaacgtgttgcgcgatatgggtttgtaggagatggtcgggtagttgtaggcggttacgtattagggtgagtcgttttcgtttttttttatttcgttttttttttttatttatattagcgtttatttcgcgggttttttcgttttttgttttttttatttttaaataaagttgttttatcggaaaggaggttttttacgtttggtttatcgattaacgggatttcggttttacggcgggaagggaagggaaggggattatttggtttatatttttttaggttttggagtcgcgttagttgggatttaggtttttttttagtcggtagttaagttaggtgaggtttttatatttagttcggttttatcgtatttttgtatagtttgtatttgtgttttcgtaattagggtagggtagggtagggtaggtacggtttggtaattttgcgtattttatttattaatttatattttgcgggggaagggagataatattatttttattttattgtatgtggggttttggtggtcgttttttggagttttgtttttaggtttgtagaggaatttttgaagaatttaagtttagtagggataggttttatattttggttgttggtttatgttttttttttatttttaggtttgtattttatagattagtatcgggttgcgtttatcgcgagggttataaacgttgagtggttgttggatgttttgtacgggaaggttttgacggatgagtagtattaggtagtgcgggtcgagtttattaatttaagtaagatgcggaagttttttagttttatattagtttggaattggatttgtaaggatttgtttttttaggttttaagggagttttagttttatttggtggaggatttggagcggagttgaggtttttttttagtaatatttcggttagtttttggtaattttattaaattattttgaatttgatttttttatatataatat

SEQ ID NO: 661 - DNA, 2589 bp, Artificial Sequence
  chemically treated genomic DNA (Homo sapiens)
tttttattttagagggtagtcggtttttcgtcggtgtttaggtcgtagggttgatgttttcgtttagttgagggaaggggaagtggaggggagaagtgtcgggttggggttaggcggttagggcgtcgtacggtttttattcggtcggtgtgtgttttcgtaggagagtgtgttgggtagacgatgttggatacgatggaggcgttcggttattttaggtagttgttgttgtagtttaataattagcgtattaagggttttttgtgcgacgtgattatcgtggtgtagaacgttttttttcgcgcgtataagaacgtgttggcggttagtagcgtttattttaagtttttggtggtgtatgataatttgtttaatttggattatgatatggtgagttcggtcgtgtttcgtttggtgttggattttatttatatcggtcgtttggttgacggcgtagaggcggttgcggtcgcggtcgtggtttcgggggttgagtcgagtttgggcgtcgtgttggtcgtcgttagttatttgtagattttcgatttcgtggcgttgtgtaagaaacgttttaagcgttacggtaagtattgttatttgcggggcggcggcggcggcggcggcggttacgcgttttatggtcggtcgggtcggggtttgcgggtcgttacgtcggttatttaggtttgttattcgtttttagtcgggttttcgtcgtcgtttgtcgcggagtcgttttcgggtttagaggtcgcggttaatacgtattgcgtcgagttgtacgcgtcgggattcggttcggtcgtcgtattttgtgtttcggagcgtcgttgtttttttttttgtggtttggatttgtttaagaagagttcgtcgggtttcgcggcgttagagcggtcgttggttgagcgcgagttgttttcgcgttcggatagtttttttagcgtcggtttcgtcgtttataaggagtcgtttttcgttttgtcgtcgttgtcgtcgttgtttttttagaagttggaggaggtcgtatcgtttttcgatttatttcgcggcggtagcggtagttcgggattcgagtttttcggtcgtttcgacgggtttagttttttttatcgttggatgaagtacgagtcgggtttgggtagttatggcgacgagttgggtcgggagcgcggtttttttagcgagcgttgcgaagagcgtggtggggacgcggtcgtttcgttcggggggttttcgttcggtttggcgtcgtcgtcgcgttattttggtagtttggacgggttcggcgcgggcggcgacggcgacgattataagagtagtagcgaggagatcggtagtagcgaggattttagttcgtttggcggttatttcgagggttatttatgttcgtatttggtttatggcgagttcgagagtttcggtgataatttgtacgtgtgtatttcgtgcggtaagggtttttttagttttgagtagttgaacgcgtacgtggaggtttacgtggaggaggaggaagcgttgtacggtagggtcgaggcggtcgaagtggtcgttggggtcgtcggtttagggtttttttttggaggcggcggggataaggtcgtcggggtttcgggtggtttgggagagttgttgcggttttatcgttgcgcgtcgtgcgataagagttataaggattcggttacgttgcggtagtacgagaagacgtattggttgattcggttttatttatgtattatttgcgggaagaagtttacgtagcgtgggattatgacgcgttatatgcgtagttatttgggttttaagtttttcgcgtgcgacgcgtgcggtatgcggtttacgcgttagtatcgttttacggagtatatgcgtatttattcgggcgagaagttttacgagtgttaggtgtgcggcggtaagttcgtatagtaacgtaattttattagttatatgaagatgtacgtcgtggggggcgcggtcggcgcggtcggggcgttggcgggtttgggggggtttttcggcgttttcggtttcgacggtaagggtaagttcgattttttcgagggcgtttttgttgtggttcgttttacggtcgagtagttgagtttgaagtagtaggataaggcggtcgcggtcgagttgttggcgtagattacgtattttttgtacgattttaaggtggcgttggagagtttttattcgttggttaagtttacggtcgagttgggttttagtttcgataaggcggtcgaggtgttgagttagggcgtttatttggcggtcgggttcgacggtcggattatcgatcgttttttttttatttagagcgtttttcgttagttcgttttgtcgttgttgcgcggttttggttcgtattttagggagcggcgggggcggcgcgtagggtttattgtgttcgggataatcgtagcgtcgttatagtggcggttttatttttcggcggttttatttggttttattgtttcgtgttttagttcgggggtcgggggagaatttcgggacgggggtgggatggggtaagggaaatttatatttttgatattagttttgattaaaggagatttt

SEQ ID NO: 662 - DNA, 2589 bp, Artificial Sequence
  chemically treated genomic DNA (Homo sapiens)
ggggttttttttggttaaagttgatattaaaaatataaattttttttattttattttattttcgtttcggggttttttttcgattttcgagttaaggtacgaagtagtgaggttaggtgaggtcgtcgagaggtggagtcgttattgtggcgacgttgcggttgtttcgggtatagtgggttttgcgcgtcgttttcgtcgttttttggggtgcgggttagggtcgcgtagtagcgatagagcgggttggcgaggggcgttttaggtgggagagaaacggtcgatggttcggtcgtcgggttcggtcgttaggtgagcgttttggtttagtatttcggtcgttttgtcggggttgaggtttagttcggtcgtgaatttggttagcgggtagaggttttttagcgttattttggggtcgtgtaggaagtgcgtggtttgcgttagtagttcggtcgcggtcgttttgttttgttgttttaggtttagttgttcggtcgtgaggcgagttatagtaaagacgttttcggggaagtcgagtttgtttttgtcgtcggggtcggggacgtcggggagtttttttaagttcgttagcgtttcggtcgcgtcggtcgcgttttttacggcgtgtatttttatgtggttgatgaggttgcgttgttgtgcgaatttgtcgtcgtatatttggtattcgtagggtttttcgttcgagtggatgcgtatgtgtttcgtgaggcggtattggcgcgtgaatcgtatgtcgtacgcgtcgtacgcgaagggtttgaggtttaggtggttgcgtatgtggcgcgttatggttttacgttgcgtgaattttttttcgtagatggtgtatgggtagggtcgggttagttagtgcgttttttcgtgttgtcgtagcgtggtcgggtttttgtagtttttgtcgtacgacgcgtagcggtagggtcgtagtagtttttttaggttattcggagtttcggcgattttgttttcgtcgtttttaaaagggggttttaggtcggcggttttagcggttatttcggtcgtttcggttttgtcgtatagcgttttttttttttttacgtgagtttttacgtgcgcgtttagttgtttagagttggggaagtttttgtcgtacggaatgtatacgtataggttgttatcgaagttttcgggttcgttataggttaggtgcgggtatgggtagttttcgaggtggtcgttaggcgggttggggttttcgttgttatcggttttttcgttgttgtttttgtagtcgtcgtcgtcgtcgttcgcgtcgggttcgtttaggttgttagggtagcgcggcggcggcgttaggtcgagcgggggtttttcgggcgagacggtcgcgtttttattacgtttttcgtagcgttcgttgggggagtcgcgttttcggtttagttcgtcgttatagttatttaggttcggttcgtgttttatttagcgatagaggagattaggttcgtcggggcggtcggggggttcgggtttcgggttgtcgttgtcgtcgcgaaatgggtcggaaggcggtgcggttttttttagtttttggaagggtagcggcggtagcgacggtagggcgagaggcggttttttgtaggcggcggggtcggcgttgggagggttgttcgggcgcgggggtagttcgcgtttagttagcggtcgttttggcgtcgcggagttcggcgggttttttttggataggtttaggttataaagaggggagtagcggcgtttcgaggtatagagtgcggcggtcgggtcgggtttcgacgcgtatagttcggcgtagtgcgtgttgatcgcggtttttgggttcgagggcggtttcgcggtaggcggcggcggaggttcgattggggacgggtagtaggtttggatgatcggcgtggcggttcgtaggtttcggttcggtcgattatagggcgcgtagtcgtcgtcgtcgtcgtcgtcgtttcgtaggtggtagtatttgtcgtggcgtttgaggcgttttttgtatagcgttacgaggtcggggatttgtaggtagttggcggcggttagtacggcgtttaggttcggtttagttttcggggttacggtcgcggtcgtagtcgtttttgcgtcgttagttaggcggtcggtgtagatgaagtttagtattaggcggaatacggtcgggtttattatgttatggtttaggttgagtaggttgttatgtattattagggatttgaggtaggcgttgttggtcgttagtacgtttttgtgcgcgcggaagagggcgttttgtattacgatgattacgtcgtataagaagtttttggtgcgttggttgttgagttgtagtagtagttgtttggagtggtcgggcgtttttatcgtgtttagtatcgtttgtttagtatatttttttgcggggatatatatcggtcgggtgagagtcgtgcggcgttttggtcgtttggttttagttcggtattttttttttttattttttttttttttagttgagcgggggtattagttttgcggtttgggtatcggcgaaggatcggttgttttttggagtgggag

SEQ ID NO: 663 - DNA, 2322 bp, Artificial Sequence
  chemically treated genomic DNA (Homo sapiens)
taggtttggtgcgcgtagagaataattttaagcgtatcgacgttcgcgagttttttttaaatatcgaacgggatttagagttcgagtttataggcggcggtcgggggagggagtagggtgttggtcgtcgttcgggagtgttcgcgttttgggtgatttttggaaggacgtggggtttaaatttcggttggggttgggagagtagtttttagaggtttttcgcgggattttttgtcgggcgggatcgtggttttataggagaagtgggtggtaagttttgtttggcggaaagtagtcgtttttttttttttgggtttggggcggcgttttttatttttgtttttcgttttttatttttgtttttcgtcggttatattttttgttttttggattttaagcgtttcgcgcgtcgaggagtttagcgttagtggcggcggttaggagagattcgggtgttaggaaagatgggtcgtttgggggatagtagggagttcgggggaaacgtaggcgtcgggtatagagtcggtatcggcgtttttagttttgtcgaagatcgcggtcgggtttggttcgcgggaggggttttggcgtcggatttgtttcggttttgcgtgggcggtttcgtcgggttttgtaggagcgacgcgcgttaaaaggcggcgggaaggaggcggggtagagcgcgttcgggatttcgatttggacgcggttagttggagaggcggagcgtcgggaggagattttggtttcgtcgcgattcggtggttcgcgttgttttttcgcgcgtcgggttaaaaaggcgttaacgttcgcggtcgtttatttttcgcggcgtttttttttttcgcgtttatataattcgtttaggggtcgggtagttcgttttgttttttcgttcgcgtattcgttcggaggttcgcgcgttcgcgaaggggacgtagcgaaatcggggttcgcgttaggttagtcgggacggacgtcgatgttcggggttgcgacggttgtaggtaggaggtttagggtcggggggcggttcggtttcgcgggcgggggttggagcgtagcgttgggtaggtatttgggttcgtagtttcgaagttgggaggtgaggggagagcgatcggggacgagttgggataaggcgatataggggttttttcggagttggatcggtttttgggatttggcgttcgcgagaggttggagcggttagagtttagtttgcgaggagacgcgggttttgtttttagcgtcggtcgtttttggcgttaaagatagtttcgtaggggtttcgggagggttttttttttgttgttttttttttatttcgggtttcgagggtcgttgggagggtaatttcgggaagaggtcggggtgcggggcgcgggtgtaggtggaaatcgttagtaagttttttttcgttcgcgcgtttttttcgatttgtagggttgtgttaatttcgaggttttagtttttttgaggagttagggttaggtttttttttggatagggagaaggatttgggcgggggttttgatttatggagttggttattaagcggtttcgatggtttttcgagggatagttttttgtggttttgagtttgtttgtcgagggtttttggtttgttttcggagcggttttaggtagagaaagttcgtgaagaaatggttcgggtcggtttggagggagatattttacgtttttttagtttttgggtcgtttttttttgtagtttttgtttttttcggggtttggatttggggagcgatgattatttttgtttagtttgtattttggtttggacgttaggagataagtttatgtagtatgtatacgtttgttatataaataggggatagatagacgatttttaattagtaagggtgtagggaaaagtaatgtattttaaatttttgattagaggttatttgtttttaaagatgttgttatttgtttatttattgtttggatatttggaaatggtttaggtttattaatataatgttttggtttttgttgttttgttttttgttgttgttattgttgtttatttgtttagttttagttttgggggaggagtaaataaagcgcgtggtttttggtatttattgagcgttgagttatttttttttggatttattcggggaaagattaaaaagtattttattaagaataggatacggtgtttgaaatgttgttatatatgaatgtatgtattacgtatgtagtttttaaaataagataaaaagttggttgggtacggtagtttacgtttgttattttttatagtttttgggaggttaaggtgggtggattatt

SEQ ID NO: 664 - DNA, 2322 bp, Artificial Sequence
  chemically treated genomic DNA (Homo sapiens)
ggtgatttatttattttggttttttaaaggttgtgagggatgataggcgtgagttatcgtgtttagttaattttttattttattttaaaaattatatacgtaatgtatatatttatatatggtaatattttaaatatcgtgttttgtttttaatgaaatgttttttaattttttttcgaataaatttaaagaggggtggtttagcgtttagtaagtgttagaggttacgcgttttgtttattttttttttagagttaaggttgaataaataaatagtaatgatagtaataaaaaataaaataataaaaattaaagtattgtgttaatgagtttgagttatttttaaatgtttagatagtgaataaatagatggtagtatttttggaagtaaatgatttttggttagaagtttggggtgtattgtttttttttgtatttttgttggttgaagatcgtttatttgttttttgtttatgtagtagacgtgtgtatattatatgggtttattttttagcgtttaggttaaaatataagttgagtaaaggtaattatcgttttttaagtttaagtttcgggaaaggtaggggttgtaggaggaggcggtttaggagttaagggggcgtgaggtgtttttttttaggtcggttcgggttatttttttacgggttttttttatttgggatcgtttcggagataggttaggagttttcgatagataaatttagagttatagggagttgtttttcgggaaattatcgaaatcgtttagtaattaattttatgggttaaggttttcgtttagatttttttttttgtttagaggggggtttggttttggttttttagggaagttgaggtttcgggattggtatagttttgtaggtcggagggagcgcgcgggcggggaggagtttgttggcgatttttatttgtattcgcgtttcgtatttcggttttttttcggggttatttttttaacggttttcggagttcggggtggagaggggatagtaggaggagggttttttcggaatttttgcggggttgtttttggcgttaaaggcggtcggcgttgagggtaggattcgcgttttttcgtaggttagattttggtcgttttagtttttcgcgagcgttaagttttaggggtcgatttaatttcgagggagtttttgtgtcgttttgttttagttcgttttcgatcgttttttttttattttttagtttcggagttgcgagtttaggtgtttgtttagcgttgcgttttagttttcgttcgcggagtcgaatcgtttttcggttttgggttttttatttgtagtcgtcgtagtttcgggtatcggcgttcgtttcggttggtttggcgcgggtttcggtttcgttgcgtttttttcgcgggcgcgcgagttttcgggcgggtgcgcgggcggggaggtagggcgggttgttcggtttttaggcgggttatatgggcgcggggaggggaggcgtcgcggggagtaggcggtcgcgggcgttagcgtttttttagttcggcgcgcgggaaggtagcgcgggttatcgagtcgcggcggggttaaggttttttttcggcgtttcgtttttttagttggtcgcgtttaagtcggggtttcgggcgcgttttgtttcgtttttttttcgtcgttttttggcgcgcgtcgtttttgtagagttcggcgaggtcgtttacgtagggtcgaagtaggttcggcgttagggtttttttcgcgggttagattcgatcgcgattttcggtagagttggggacgtcggtgtcgattttgtgttcgacgtttgcgtttttttcggattttttgttgttttttagacggtttattttttttgatattcgggttttttttggtcgtcgttattagcgttgggtttttcggcgcgcggggcgtttggaatttaaggggtaggggatgtggtcggcggggaataggggtgaggggcggggaataggggtgaggggcgtcgttttaggtttaggaggaggggaacggttgtttttcgttaagtagggtttgttatttattttttttgtggagttacggtttcgttcggtagaggatttcgcggagagtttttgggggttgtttttttaattttagtcggagtttgggttttacgtttttttaggggttatttaggacgcgaatattttcgggcggcggttagtattttgttttttttttcggtcgtcgtttgtgggttcgggttttggatttcgttcggtgtttggaaggagttcgcgggcgtcggtgcgtttggagttgttttttgcgcgtattagatttg

SEQ ID NO: 665 - DNA, 2345 bp, Artificial Sequence
  chemically treated genomic DNA (Homo sapiens)
cgtcggtttcgcggttttatcggatagggcgagtatcgagtcgtatattttgtagtttattattttcgtgttttgcgtgacgtagtttatttatagttttttgtatatggtttgggtcgtgatgatgttgttattcgtataggagtttatttgttattgcgggatggcggtgtaggttattagatttatttagtttagtagggttatggagaagtttagtaattgtaggttcgaattggttattttcgtttttagaaaatattgggggcgtcgggcggggagattttatagtaaaataaacgatatttggggggtagttttataaaagaaaatttgaggtggagtttttcggttatttaaagagataaaaagggtttgggttaggtgaatgtaaattttgttattaaattatatataaatcgatttttttagtgaagcgatggtttcgcggtatagggagtaggatacgtcgggagggtggttttagataaaattggtggttttcgaaggttaggcggtttttttcgggcgttttcggcgattttaggtaaataaaaggtggaggggtcgtttgggcgcgtttttgagcgtcggtaagttttaaagtattttgggttgtaggttcgaggttgcggtgcgtagtagaggtggttcggaggtgagttagtaggtgcgggcggataggtggggcgtatttgagtatatgtagggcgtcgggggcgcggttcgcgcgtttcgggagcgcgggagggggaggcgggatcggaggggcggtcgaggatgatttgacgttatcgaagggatatttatttgaatcggaagtcgtggtttttatttttttttgtttaggtgaggaggaagaaatttgagtattagggttacgttttttcgtttgttcggttttgatcgtcgttggggaggaggcggtggttttttaggagttttaagtttcgagttagttttttcggattggatttttttcgaatatcgggaagtttttttttttttttttaataggtgcgtttgggacgttgcggggcgtttttgataagtttcggcgtcgtttttttttcgtcgggttttgtttaaagtgtttttttttcggttttgttttcgtttttattcgttgtttttttttttttttttgttttttattttggtcgattttattttcgggggttttggttcgatttttgagagtcgttttttttagtattttttttagtgtttcggttttttggttttgttatagatattcggtttagcgtggttttttaatagttttatttttttgtgtttttattttaatttaatatgatttatagtttgaattttttgtatttaatttttttatttattattgtttttttcggtattaaggtttttaattggaggaagaaattattgggatttaaagtcggtcgagggtggggagtagggtgagggttaggttagagttttggttatatttatcgttttttttttttagagtttttttagatttattttttattttttttattttttttttatattcgttcgtttttttttttttttcgggtttgggtttggattgttaattgttgtgtattttgttacgttttattgtttcgttttttttataatttggttttttaaggtggtcgtttatggttttttattttgtagttttgttatttttttttaaagtattgtttttttttttttttcggtattttttttagttttttgttttttttttttttatttttggttattttttttttttgttttttttgttttggagttttttgttttattttttgttttttttttgttgttgtttgagaggaggaagtttgtgttatttaggttggagtgtagaggtgtaatttcggtttattgtagtttcgttttttgggtttaagcgattatttcgttttagcgtttttagtagttgggatcgcgggtgtatattattacgtttagttaaagtttttgtatttttggtagagaagggtttttattatgttgtttaggttggttttgaatatttgaattgaagtaatttttttgtttttattttttaaagtgtaggattataggcgtgagttatcgtatttagtttattttttgttttttcgtttatttttgcgttttgtttttagtttttttggaatttagtattagtaattaattttttttttttttttttaggtgtatattgtattttttttatttattttgtttagtttttttttaatttttttattattttttaatttttttatattttttagatttttatatattttgtttattttggtttttttttattttatttttttttttttattttttatttt

SEQ ID NO: 666 - DNA, 2345 bp, Artificial Sequence
  chemically treated genomic DNA (Homo sapiens)
gaggtaaaaaatggagagaggaaaatgaaatgagagagagttagaataagtagggtatgtgagaatttgagaagtatgaggaggttggagggtagtaggaagattgggaggaaattgggtagggtgggtggggaaagtgtagtgtgtatttaagaagaggaaagaaagattaattgttgatgttgggttttaaggagattggagataaggcgtaaaggtaaacgaaaagataaggagtgggttgggtgcggtggtttacgtttgtaattttgtattttaggaggtgggggtagggggattgttttagtttaagtgtttaagattagtttgagtaatatggtgaaaatttttttttattaaaaatataaaaattttagttgggcgtggtggtgtgtattcgcggttttagttattggggacgttgaggcggggtgatcgtttgagtttaggaggcgaggttgtagtgagtcgagattgtatttttgtattttagtttgggtaatatagattttttttttttaaataataataaaaaaaagataaggagtgaaataggaagttttaaagtaggaaaggtaggaaggggagatgattaaagatgaaggaggaaggagtaaaaggttggaaggggtgtcgggaggaaggagggagtaatgttttggggagagatagtaggattgtagggtgagggattatggacgattattttagagagttagattatagggaggacggaatagtgaggcgtgatagagtgtatagtaattggtagtttaagtttaggttcgggagggaaagagaaacgggcgagtgtgggggaggggtgggaaaggtggaggataggtttgaaaagattttaagggaggggaacgatgggtgtggttaagattttgatttagtttttattttgttttttattttcggtcggttttaggttttagtggtttttttttttagttaggagttttgatgtcggaggggatagtggtaggtggggaggttgagtgtaaagggtttaggttgtaagttatgttgggttggaatgggggtataggaaggtggggttgttggggagttacgttaagtcgggtgtttgtagtagagttagagaatcgggatattgaagagggtgttgaagggggcgatttttagggatcgagttagggttttcgaaggtgggatcgattagggtaggagataggaaaaaaaaggagagtagcgggtgggggcgaaagtagggtcgaggagagagtattttggatagaattcggcggggaaagggcggcgtcgaggtttgttaggggcgtttcgtagcgttttaggcgtatttgttgggaagaaaggaaggggtttttcggtgttcgagggaaatttagttcggaggggttgattcggagtttgggatttttggggagttatcgttttttttttagcggcggttaaaatcgggtaagcgaaggggcgtgattttggtgtttaggtttttttttttttatttgggtaaggaggggtgggggttacgattttcggtttaggtgagtgttttttcggtgacgttaggttattttcggtcgttttttcggtttcgtttttttttttcgcgttttcggggcgcgcgggtcgcgttttcgacgttttatatatatttaggtgcgttttatttgttcgttcgtatttgttggtttattttcgagttatttttgttgcgtatcgtagtttcggatttatagtttaggatattttgggatttgtcggcgtttagaaacgcgtttagacggtttttttattttttgtttgtttagggtcgtcgagagcgttcggagggaatcgtttggttttcggggattattaattttgtttggaattattttttcggcgtattttattttttgtgtcgcgaggttatcgttttattggaggggtcgatttgtgtgtagtttggtgataagatttgtatttatttggtttaaattttttttgtttttttgggtgatcggaaaattttattttaagtttttttttgtggggttgttttttaagtgtcgtttgttttattgtagggttttttcgttcggcgtttttagtgttttttgagggcggaaatggttaattcgggtttgtagttgttgggtttttttatggttttgttgggttgggtgggtttggtggtttgtatcgttatttcgtagtggtagatgagtttttatgcgggtgataatattattacggtttaggttatgtataaggggttgtggatggattgcgttacgtagagtacggggatgatgagttgtaaaatgtacgattcggtgttcgttttgttcggtaaggtcgcgggatcgacg

SEQ ID NO: 667 - DNA, 2415 bp, Artificial Sequence
  chemically treated genomic DNA (Homo sapiens)
taaggatgtgggaataggtaagtaatttttatattggatttttattttagggagttgggttttagttatagttttgagttgtgtgattttgggtaggttttattttttcggggttttgttttattagttgaatagtatgaggatgagttatagttaatatttgttttatgatatttatttagtattatataagtgttatttttgtttttttagttaatattgacgtgggtagtattatatgtttattttatagatgaggaaattgaagtttgaagaagttaaatatttattttagaatatatagttggtaagtggtagatttggaattggaatttagtttagtttgattttttaatttatgtttttgattattatattgtttttttaagtttagatttgaaattttattttttgtgtggttgtgtgtttgggataggggtaattaatttttgattattttatatgttgtatagaatttggagaggattttttaaagtaaatgaatttcgaaagttggattgtagagtaaacgagtgtagttaatttagttaggggtttgtaagagggagaaagagaaaaagattgtggaatggaaagttttttaatttaagttttttttaaggggtagttattttttgttttatagtttagggtttgtatgtgttttttttggagtggaaaaatatataagttataaggaatttaatagatagaaaggcgtatagaggaatttaaagtgtgggttggggggcgaggcggtgggcgggaggcgagcgggcgtaggcggaatatcgttttttaagttaagtcgtcgtaaataaaaaggcgtaaagggagagaagttggtgtttaacgtgagttaggagtagcgtttcggttttttttttgtttattttaaaagtattttttgtattgtttttaaggtgagaaataggaaagaaaacgtcggtttgtgcgttcgttgtttgtttttttggttgtttgtttttgtagggttgttgggagtttttaagttttgtgagaattttgggagttggtgatgttagattagttgggttatttgaaggttagtagttcgggtagggtttatcgaaagtttattcgtatatattaggtaatttaattttttattttgtgtgatagaagtagtaggaagtgagttgtttagaggtaggagggtttattttttgttaaaggggggattagaatttttttatgcgagttgtttgaggattgggatgtcgagaacgcgagcgattcgagtagggtttgtttgggtatcgtcggggtaggattcggaacgtattcggaaggttttttgtaagtatttatttggaaggagaatttgggatttttttgggaatttttcgtttcggttggattggtcgagtaagtttggaaaatggtaaatgattatttggattaattataggtttttagttggtttgtttgttataatttatgattcggggttgggaaaaagattaatagtttacgtgttaaaaaaggggtagagtttgatggagttgggtggatttttttatgttatttgtttttatatttagaggataagtatttttgtagatatttagtgtaagggagattatgtttgattgtatggatgttttgttagtgagttttgggtaaattttggatttttatattgcgagttcgtttttttgtatgttttaggagaaagtttttaaagtatgttttagtggattgatttaaatcgaatggtagtatcggtatattgtttaatgtaggtttatttttttttttttttttattaagaaaaaaaaaattgttttttttgtatgtaataaagacgttggaaataaattgtattggtagtaagataaaggatttaatgatttaatgttgaaggggtgtgatatgttggtatgtatattgattttttttgttgaaaattttttgttagatgttttttttttaaataatttttttcgtttttatgtttttttttttattaattttatagttttttgaaaatagtttttaaaatatgtataaaaatgtggggggtggggagtagagggtgattataagattttaaaatattttttaagtagggtaatttgatatattttgtagtttttattaaaatgtatgtagagtggaatttaattttgttgttttttggattagttattagttgtataggtttttttattttttgtgtattttaatagtttaaagtaattaaaatatgatattttttttgaaaggaatttagtttaattaaggtggttgttgttttcgaagtttataaattattagtttaagttgtcgtttttaatgttttttttgttaaggaaaggtaatattttttagtattgattttgttgttatttttttaagttattttgttggtttaagaagttgttgttttgt

SEQ ID NO: 668 - DNA, 2415 bp, Artificial Sequence
  chemically treated genomic DNA (Homo sapiens)
gtaaaatagtaattttttagattaataaagtgatttggaaaggtggtagtagggttaatgttaagaaatattgtttttttttagtaaggaaaatattggaagcggtagtttgaattggtggtttatgaatttcgggagtagtagttattttaattaaattaaattttttttaaggaaaatgttatattttaattattttggattgttggaatatataaggggtggggggatttatataattagtagttaatttaaagaatagtaaagttaaattttattttgtatatattttagtaaaaattgtaaaatgtgttaaattgttttatttgaagaatgttttaaagttttgtggttattttttattttttattttttatatttttatgtatattttaaaaattgtttttaagagattataaggttggtaaggagaggagtatgggggcgggaggggttatttgggaagaaaatatttaataggaaatttttagtaaagggaattaatatgtatgttagtatattatatttttttagtattaaattattaaattttttgttttgttattaatgtagtttatttttaacgtttttattgtatgtaagagagataatttttttttttttggtagaagaagggaaaaaaataaatttatattgagtagtgtgtcgatgttgttattcggtttgggttaatttattgaagtatgttttgagagtttttttttggagtatgtaggaagacggattcgtagtgtagaaatttaggatttgtttaggatttattgatagaatatttatatagttaaatatgattttttttgtattgaatgtttgtaaaagtgtttattttttaggtgtggaggtaaatggtatagaaaagtttatttaattttattaaattttgttttttttttggtacgtaggttgttggttttttttttagtttcgaattatgaattatgatagataagttagttaaaagtttgtaattgatttaaatgattatttattattttttaggtttgttcggttaatttagtcggggcggggggtttttagaaagattttaagttttttttttaagtaaatgtttgtaaaaagtttttcgaatgcgtttcggattttatttcgacggtgtttagataaattttgttcggatcgttcgcgttttcggtattttagtttttaaatagttcgtatgggggaattttggttttttttttggtaaagaatagatttttttgtttttgaatagtttattttttattatttttgttatatagaatgaaagattgaattgtttaatatatgcgagtgaattttcggtgaattttattcgggttgttaatttttaaatgatttaattagtttgatattattaatttttaggatttttatagagtttaaaaatttttagtagttttgtaaaagtagatagttagagaggtaggtagcgagcgtataagtcggcgtttttttttttattttttattttaaaaataatataagaagtgtttttaaaatgagtaggggaggagtcgggacgttgtttttggtttacgttgagtattaatttttttttttttacgtttttttatttgcggcggtttagtttggaaaacggtgtttcgtttgcgttcgttcgtttttcgtttatcgtttcgttttttagtttatattttaaatttttttgtgcgtttttttgtttgttaaattttttataatttatgtatttttttattttagaaaaagtatatgtaagttttaaattgtagaatagagaatggttattttttgggaaaggtttgggttgggaaattttttattttatagttttttttttttttttttttttgtaagtttttggttgaattgattgtattcgtttgttttgtaatttagttttcgagatttatttattttgaaaaattttttttaggttttatgtagtatatagagtagttaggaattggttatttttgttttaaatatatagttatatagaaaatgagattttagatttggatttgaaaaaatagtatagtggttaagagtatgggttggggaattaaattgaattagattttaattttaggtttgttatttattagttgtgtgttttgggataagtatttaatttttttaggttttagtttttttatttgtaaaatgggtatataatattatttacgttagtgttaattgggaggatagaaataatatttgtatggtgttgggtaaatattatggaataaatgttagttgtgatttatttttatattgtttaattggtgaaataaaatttcggggagatgagatttatttaaggttatatagtttagagttgtgattagaatttagttttttaggatgaaagtttaatgtgaaaattatttgtttgtttttatatttttg

SEQ ID NO: 669 - DNA, 2442 bp, Artificial Sequence
  chemically treated genomic DNA (Homo sapiens)
tttttaatatgtttttgaaataaatttagtttaatttcgaaagtataaatatggttaaaggtagtagtagtaaagattttattaattcgtaattttttattgagttttcgaaggtgttttataatgtttattaagaagttaaagttataaagttattgtttgtttgagaagtggattgttgttgtttttattgaaattaagaacgtttttatttttttttttagagagaatattagttttaaagtttttttttttttaagttaattgtttagatatcgtttattaatttttttattatgttttgatttagatttcgttagtaaagtttgaaatttaggtcgtttaacgtttttggttttaattaaaattatttattcggatatggtatttatgatttgattaatatttatattataggagtttaatagttttaagtgaagaaattttgaataatgaatgatattttaatagttggggtttacggtttttttttttatgtatgagacgagttttgagtttttattaattatttttaaagtatgggtcgtggttagtttaattattttttgtaagttaagttttgttgtttgtagggattttaggattgtcgatatgagcgtattaatattgaaatgatgagttaggttgattatggttagaagatttttttgtatttttaatttagggtttatatcgcggataaagattaggaggtagtttttataggttataaaagtttggtcgtttaaggtaagagaataggttttaaagtttttggttcggttaaaaagttggttgcgtagatttttgttaatgtttaggattttttgttttgtgatatttggagataagttaacgttttgtaggacgtttatatgttcgggtagtattttttttagtaatatttttatgtattggtatataaagttttttttattttagtcgcgattttttaaggttaagaggcggtagagttcgaggtttgtacgagtagttttttttttaggagtgaaggaggttacgggtaagtcgttttgacgtagacgttttattagggtcgcgcgttcgtcgttcgttatatatcgttcgtagtattcgtgtttagtttcgtagtggcgtttgacgtcgcgttcgcgggtagttacgatgaggcggcgatagattaggtatagggttttatcgtttttcggaggttttattattaaataacgttgggtttattcgggtcggaaaattagagtttcgtcgatttttattttgttttttttgggcgttatttatattttgcgggaggttataagagtagggttaacgttagaaaggtcgtaaggggagaggaggagtttgagaagcgttaagtatttttttcgttttgcgttagattattttagtagaggtatataagttcggtttcggtatttttgtttttattggttggatatttcgtatttttcgagtttttaaaaacgaattaataggaagagcggatagcgatttttaacgcgtaagcgtatatttttttaggtagcgggtagtagtcgttttagggagggacgaagagatttagtaatttatagagttgagaaatttgattggtatttaagttgtttaattaatagttgtcgttgaagggtggggttggatggcgtaagttatagttgaaggaagaacgtgagtacgaggtattgaggtgattggttgaaggtattttcgttgagtatttagacgtttttttggtttttttggcgttaaaatgtcgttcgtggtaggggttattcggcggttggacgagatagtggtgaatcgtatcgcggcgggggaagttatttagcggttagttaatgttattaaagagatgattgagaattggtacggagggagtcgagtcgggtttatttaagggttacgatttaacgggtcgcgttatttaatggcgcggatacgtttttttgttcgggtagaggtatgtatagcgtatgtttataacggcggaggtcgtcgggttttttgacgtgttagttaggtttttttttttttcgtagatcgtgtgtttttttatcgttttttttcgagattttttaagggttgtttggagtgtaagtggaggaatatacgtagtgttgttttaatggtatcgttaattaagtaaggaagttatttaatttaaaattatgtatgtagaatatgcgaagttaaaagatgtataaaagtttaagatggggagaaaaatttttttttagagggtattgtgttattgtttttttgttttttatttattttagaaattatttgtttatatttaaaggtataatttattttgagttttttttaaaataaatcgtttgtagttttaggataggttgatgtattttgggtttgatttttgattattttattgttaaattagtgattttttttagtgtttttttgttttttatttcg

SEQ ID NO: 670 - DNA, 2442 bp, Artificial Sequence
  chemically treated genomic DNA (Homo sapiens)
cgaaataaaggataggaaaatattaagaggggttattaatttaataatagggtaattagaagttaagtttaaagtgtattagtttgttttaaaattataaacgatttgttttgaaagaaatttaaaatgaattgtgtttttggatgtgaatagatgatttttggaatgaatgaaaagtaagaaaatagtaatatagtattttttgaaaaaaggtttttttttttattttaagtttttatatattttttaatttcgtatgttttgtatatataattttaaattaagtggtttttttatttagttaacggtattattaagataatattacgtatatttttttatttatattttaaataatttttaaaaggtttcgggggagagcggtaaagaaatatacggtttgcggaaaaggagaaggtttgattggtacgttagggaattcggcggttttcgtcgttgtgggtatgcgttgtatatgtttttgttcgggtaaagaggcgtgttcgcgttattgagtgacgcggttcgttaagtcgtagtttttaagtgagttcggttcgatttttttcgtattagtttttaattatttttttgatagtattagttggtcgttggataatttttttcgtcgcgatgcggtttattattgtttcgtttagtcgtcgaataatttttgttacgaacgatattttggcgttagaagagttaaggaaacgtttagatgtttaacggaagtgtttttagttaattattttagtgtttcgtgtttacgttttttttttagttgtagtttacgttatttagttttattttttagcggtagttattgattggatagtttgaatgttagttaaattttttaattttgtgggttgttgggttttttcgtttttttttgaagcggttattgttcgttatttagaaggatatgcgtttgcgcgttagagatcgttgttcgttttttttattggttcgtttttaggagttcggggaatacgaaatatttagttaataggagtagagatgtcggaatcgggtttgtgtgtttttgttgaggtgatttggcgtagagcggaggaggtgtttggcgttttttaggttttttttttttttttgcggtttttttaacgttggttttgtttttgtggtttttcgtagaatgtggatgacgtttaaaagaagtaagatggaagtcgacgaggttttagtttttcggttcgagtggatttagcgttatttggtggtggagttttcggagggcgatggggttttgtgtttggtttgtcgtcgttttatcgtagttattcgcgaacgcgacgttaggcgttattacgaggttgagtacgaatattacgagcggtatgtggcggacggcgagcgcgcggttttggtggagcgtttgcgttagggcgatttgttcgtggttttttttatttttgaagagagagttgttcgtgtaggtttcgggttttgtcgttttttggttttgaagggtcgcggttggggtgagggggattttgtatattagtgtatggaggtgttgttgagagaggtattgttcgagtatgtaagcgttttgtaaggcgttgatttatttttagatattataaggtagaggattttgagtattgataggaatttacgtaattagttttttaatcgagttagggattttaaagtttatttttttgttttggacgattaggtttttgtggtttatgagaattattttttggtttttattcgcggtgtaggttttgagttggaggtgtaagaagattttttgattataattaatttgatttattattttagtgttggtgcgtttatgtcggtaattttagagtttttgtagatagtagggtttagtttgtagagaatggttggattgattacgatttatattttgaggatgattggtgagaatttaggattcgttttatatatgagagaaaaggtcgtaagttttaattgttggaatgttatttattatttaggatttttttatttggaattgttgagtttttatgatgtagatgttaattagattataaatattatattcgaatggatagttttgattaagattagaggcgttaggcgatttgaattttagattttattaacggaatttgaattagagtatggtgaaagggttaatggacgatgtttgaataattggtttaggagagggaaaattttaaaattaatattttttttaagaaaagaaatggaagcgtttttggttttagtaggggtaataatagtttattttttagataaataatggttttgtgattttggttttttggtggatattatggaatattttcgagaatttagtgaagaattacgagttagtaaagtttttgttgttgttgtttttgattatatttgtattttcgaagttaagttgaatttattttaaagatatattgagga

SEQ ID NO: 671 - DNA, 2319 bp, Artificial Sequence
  chemically treated genomic DNA (Homo sapiens)
ttgatttaataggtttgcggtgggatttaggttagcggggaggattgtaaaagtatttttggtgattttagttggtgtttatttaggggagagtaatttttgtttgttggcgatttttaggggtgtagaaggattgttgggtgtgtggttgcgtgtatattttagtatttgatttattgggttagaaaagggtgtttgttaaataaagatttaataaaatttttgtttgtagggggtttattaaaggttttaaatttttttaggtttttttttataggtggtaatttttttttattttaaaggttttggagggggttatgagtgtttgagaagaggtaagtttgggaagatggatttcgaggatagtaggtataaatttttttttaagaagggttaaggtattttaaagataagaaatttaaaattagcgtatttttatatataagtagttatttttgtttatttgtggtttagatacgagtggagtgcgataagggataaattattttcgcgtattttttagcgatggggcgaaagtaacggatttagttttcgggagttgttttcgtcgattttttttgtcgcgatttgattcgcggcgattgcgttgttttttggttgtttttttcgttttcgtaggcgcgcggggttattatttacgcgcgtattgtaggtttttgcgtacgacgttttagatgaagtcgttatagaggtcgtattacgtgtgcgtggcgggtttcgcgggttggaagcggtggttacggttagggattagttgtcgtgtggggttgtacgcggtgtttcgcgcgatgcgtagcgcgttggtacgttttagtcgggtgcggttttttttagcgcgtttagcgggtgttagttttcgtagtttaatgagtttaggttttttcgatatggttcggttgggttcgtgtttcgttggttttgggcgttagtaagcgcgggtcgggcggggttatagggcgggtttcgattttagcgttttttttaggatttagattgggcggcgggaaggagttgaggagagtcgcgtaatggaaatttgggtgtagggattgtggggttcgaaggcggggttgggcgcgttttcgtagagtttttttcgttttgtttttttttttttttttcgttttttttttatattttatttcggacggttataacgacggcgatcgtaaagtattacgcggagatattcgtgtttttggaggttagttttattgtgttagaggaagagggtttttatattcggttttggtttttttggttcggtttgttgaagtaatatatttggtttatttattgggtggggtaggaagtttcgagtttttatttggggtgaggaggagggagatcggttagtagttttatcgttcgttttgttttttattgcggagattggggtttcggtagaggttggatcgtgattttgaggtttaggggtgtattttgggtggatttttttggtatgggtggtcggtttttagtaattgtagtttttatttggttttgttattttgggttgttaggatataagtttttttatgttttttttagtgtttgatttggtattttttgtaggtaggtgggtattgaggatggtaatgtatgtgggggatgtgggagtagggtttagaggtttaaggttttaggatatttttatttgtagtaatattatttattttggtatcgtgagtagcgtttagaagtttttgtattgtagtaagtatagcggggtcgttttggagttattgtttttagtatatttagtttgtaggttttagtttatttgggggaaagttaggaaggtttgattggttttggaaggtgggggtattttatttatatttatgttttttgtattttttttattttttttgttatttttataggttttattttcgcgtttgtagtcgtaggttttgttttgaggggttgaatatatgttggagttggtgtttggtaattgtttgttatttgtttttgttttttcgttttagtcgtttttagatttttgggatttaggagagagaagtggagagtggtaggaaggtgttggtaaagtgggatagtggttttgagtagttaattttttagtgtttatttgttttaatattaggttttttttaggaggttgggttttagttagggttagatgggttaggaaattttgtaagtgggttaggttgggtagttggtttagtagtgtgtttgtgaggaaggttcgaagttgtaagggtgtttagtggaggttagtgtgatgtaggtgttggttagggggttaaggaaaaggaaggggttggg

SEQ ID NO: 672 - DNA, 2319 bp, Artificial Sequence
  chemically treated genomic DNA (Homo sapiens)
tttagttttttttttttttttggttttttggttagtatttgtattatattggtttttattggatatttttgtagtttcgggttttttttatagatatattgttggattagttgtttaatttggtttatttgtagagttttttggtttatttgattttaattgaaatttagttttttaagaaggatttggtgttggaataggtaggtattggaaagttagttgtttaggattattgttttattttattagtatttttttgttattttttattttttttttttagattttagaaatttgggagcggttggagcgagaaaatagaggtaagtggtaggtaattgttaagtattagttttagtatgtgtttagttttttagagtaggatttgcggttgtaggcgcgaaggtaaggtttgtggaaatggtagggagggtggaggggatgtaggaggtatggatgtgggtggggtgtttttattttttagggttagttagatttttttgatttttttttaggtgggttgagatttataggttggatgtgttagaggtagtggttttagagcggtttcgttgtgtttattgtagtgtagaggtttttaagcgttgtttacgatgttagaatgagtggtattgttgtaggtgagggtattttagaattttggatttttaagttttatttttatattttttatatgtattgttatttttaatatttatttgtttgtagggagtgttaagttaagtattgggaaaagtatggaaagatttgtgttttggtagtttagggtgatagagttaaatgagggttgtagttgttgagggtcgattatttatgttaagggaatttatttagaatgtatttttgaattttaagattacggtttagtttttgtcggagttttagttttcgtagtggagagtagagcgggcggtaaagttgttgatcgattttttttttttttattttaagtgaaggttcgagattttttgttttatttagtgggtaggttaagtgtgttgttttagtaaatcggattaggagggttagggtcggatgtggggattttttttttttagtatagtaaagttggtttttagaaatacgggtattttcgcgtggtgttttgcggtcgtcgtcgttgtggtcgttcggggtggggtgtgaggaggggacgaaggagggaaggaagggtaaggcggggggggttttgcgagagcgcgtttagtttcgttttcgggttttatagtttttgtatttaggtttttattgcgcggttttttttagttttttttcgtcgtttagtttggattttgggggaggcgttgaagtcggggttcgttttgtggtttcgttcggttcgcgtttgttagcgtttaaagttagcgaagtacgggtttaatcgggttatgtcgggggagtttgagtttattgagttgcgggagttggtattcgttgggcgcgttgggaagggtcgtattcggttggagcgtgttaacgcgttgcgtatcgcgcggggtatcgcgtgtaattttatacggtagttggtttttggtcgtggttatcgtttttagttcgcggggttcgttacgtatacgtggtgcgatttttgtggcgattttatttggggcgtcgtgcgtaaaggtttgtagtgcgcgcgtgagtagtggtttcgcgcgtttacgagagcggaaggggtagttaaggggtagcgtagtcgtcgcgggttaagtcgcggtagagggggtcggcggggatagttttcgaggattaggttcgttattttcgttttatcgttgaagagtgcgcgaaaatggtttattttttgtcgtattttattcgtatttgggttatagatgagtagaggtggttgtttatatgtaaaaatacgttgattttaagttttttatttttaaaatgttttggttttttttgagaaagggtttgtgtttattgttttcggagtttatttttttaggtttgtttttttttaaatatttatgattttttttagaatttttagggtgaagggaaattattatttatgggagggagtttggaaaaatttagaatttttggtgggttttttgtaagtaggagttttgttgagtttttatttagtaaatatttttttttgatttagtgaattagatgttaaaatatgtacgtagttatatatttagtagtttttttgtatttttgggaatcgttagtaagtaaaggttgtttttttttgggtagatattagttggaattattaggggtgtttttatagtttttttcgttagtttggattttatcgtagatttgttgaattaa

SEQ ID NO: 673 - DNA, 2441 bp, Artificial Sequence
  chemically treated genomic DNA (Homo sapiens)
ttgttttttaaaatgttgtttattatattaaaatataattttgttttttaaatagcgagtaaaattaaattaattttatttttttaaatagaagtttatttaaagtttttttataaaaatgatatttatttgatttaatattgtttttttaataagaataatacgtagggtgttagagggtagttgttggatttttttttagtaaataaaggagattagttagagtttagtttggtttgtttaggaaaggaggaacgtagtttgttgatatggttaaggaatgttaattaatatattttaaaatttttattattttgtttgagacgtgtatatttttttaggtttttaaagtttaattagaaagtgtatttaattttattgttattttatttatagtggggaagtttatcgaggaaaattatagggaaataaaatgttttttagttatttatattagtataattaatttagagtttacggtataaattaaataagttaatttgttagtgttttgaatgaagatatttaattaaagtatgtattttttaattttttagtagtttttaggatagttggttttggtgatcgttttttggttttttattgtttttaatacgattggttttttatcgtaggattttaaataaaatgagataattaaattatatttcgagcgaaggggcgtttattttgtagataaatatatcggttttgttttttttaaaatgcggatacgtgtttttttcgtattagggggggtttttcggcgcgcgtttcgtcgttatttgttgaggaaagcgagcgtattttttgtagtttaggtttcgggcgttagttttgtttcgtagttttagagttcgtcgtagttcgggtggttttttttcggtttagcgttcgtcgtttgtttttcgttttgtaagttttaagaggtagttatttttcgtagttttcgcgtttgtaattgttttttggcgggggagtgggtgtttaaaaagttagtagttggagaaattgaaaagattataagcgatttaacgataagtttttttttttttttaaagatcgagaggagggtagaggggagtagtgtttgagtttacgtgatcgagttagggagttcgacggttttaggaacgttcgacgtcgcgcgtgatttttaagtgggagtattttcgaatcgatttttggtttatttataaggatagtggcgtatagatggcgtttttcgtagttttagttttagatttaagaggtttggagtagggtttgagaatatgtatttttaattaggttttgggggatgtcgatattgatatagttagtttggggattatatttcgaggattacgtttttagtttttgatttatataagtgttatttagaatagatgtttgattttaaggagttagtggtgaaattagagaggttttgggtttgttaaatttttagtagtaaacgtaatttcgggttttggagtggtaaagtcgtggattagaggtggagggagtgggtttttagtttttaagaggttattgggaaggtttttcgcgttagattaaagattttaggtattttttcgaatttatttgaagtggtatcggggagatttgtgttttcggttacggcgttttttttcgttggaggtatttgtttattttttttttcgggcgaaggtttttcgcgttttttggtggtagttttagtttttttagtttaatggggtgttttttttatttattttagtaggagttttagggtgcgagattaggattatagttttaattggttttaaggtagttgttgttgatgaaaatgaaaaggaaagtagtatgtgatttataggttattgtgagaattttttagtgttatatttgtgtttaattaattattaaattatttatttaggtggtataagggatatggtttttgagggttgtgatttagatttttaatagaggaagacgagggggggtatttggagggaaagttttatagtattagttttagttgtttggtgtttagttaaaatagagagacgtaagtgtgttttgggttgataaagatgaggtttataggtaatgaagataggttttaaagatggagaagtatttgttttattagttaaataatagttgtgaaaagtttttattgttttattttaagtttaatttttattaaagttgagagttttggttttttttaggttgaaaggtagagtttttttgtttttgaggtagagaagttagtttggacgggaagagtgtgtcgttggtaaataattgtagtagataatatgttaattttagtttttttgttttttgttttggggttttttaaagtatttagtttttatatgttttttttttttgttattttatggagaaaatgttaaatgatggtttaaaaaaattagttttatggttaggtatggtggtttata

SEQ ID NO: 674 - DNA, 2441 bp, Artificial Sequence
  chemically treated genomic DNA (Homo sapiens)
tgtgagttattatgtttggttatgaagttgatttttttaaattattatttaatattttttttataaggtggtaaggaggaagagtatatggggattgggtattttgagagattttaggataggagatagggaggttgagattggtatgttgtttgttgtagttatttgttagcgatatatttttttcgtttaaattaatttttttgttttaaggatagggagattttgttttttaatttgagagaaattaggatttttagttttaatgaaaattggatttagggtggggtagtggagattttttatagttattgtttagttgatgaagtagatgtttttttatttttggagtttgtttttattatttgtggattttatttttattaatttagagtatatttgcgtttttttattttggttaaatattaaatagttgaggttggtattgtaaaattttttttttaaatgttttttttcgtttttttttattagagatttggattataatttttaaaaattatgttttttatgttatttgagtagatggtttgatgattaattaggtatagatgtgatattggggggtttttataatggtttgtgggttatatgttatttttttttttatttttattagtaatagttgttttaaagttagttaagattgtggttttagtttcgtattttggggtttttgttggggtgggtgaggggaatattttattaagttgggggaattggggttgttattagggggcgcgaggggttttcgttcgagaagaggggtgggtaggtgtttttagcggagaagggcgtcgtggtcggaggtataggttttttcggtgttattttaagtgagttcgaggaagtatttgggatttttgatttaacgcgaaaggtttttttagtgattttttgagagttgagaatttattttttttatttttagtttacggttttgttattttagggttcgaggttacgtttgttgttggggatttgataaatttaaagtttttttggttttattattggttttttagaattagatatttgttttgaatgatatttatgtgagttaggggttgaggacgtgattttcgaagtgtggtttttagattggttgtattagtgtcggtattttttaggatttggttggaaatgtatatttttaggttttattttagattttttaaatttgagattggggttgcggggagcgttatttgtgcgttattatttttgtgggtggattaggagtcggttcgagggtgtttttatttagaggttacgcgcggcgtcgggcgtttttgagatcgtcgggttttttggttcggttacgtgggtttaggtattatttttttttatttttttttcggtttttaaaaggaagaaggggtttatcgttaagtcgtttgtgatttttttagtttttttagttgttggttttttggatatttattttttcgttaggaggtagttgtaagcgcggaggttgcgagaaataattgttttttgaaatttgtagggcgaagagtaggcggcgagcgttgggtcggggagggattattcgagttgcgacgggttttggggttgcggggtagggttggcgttcggagtttgagttgtaggaggtgcgttcgttttttttaataggtggcggcggggcgcgcgtcgggagattttttttaatgcgggaaaagtacgtgttcgtattttagagaaggtaaggtcggtgtgtttatttgtaaggtaagcgttttttcgttcgaggtgtggtttaattgttttattttgtttgaaattttgcggtgagaaattagtcgtgttgagaataataaaagattaaaaaacgattattaaaattaattgttttgaaagttattggaaagttggaaaatgtatgttttgattaaatgtttttatttaagatattggtaagttaatttatttagtttgtgtcgtgagttttgggttgattgtgttaatatgaataattgaaaaatattttatttttttatggtttttttcgatggatttttttattatgggtgaaatgataatggagttgaatatattttttgattgaattttgagggtttgggaagatgtatacgttttaggtaagatgataggggttttaaaatgtattaattggtattttttagttatgttagtaagttgcgtttttttttttttgggtagattaagttaagttttaattggttttttttatttgttgaagaggagtttaataattgttttttaatattttgcgtgttatttttattggaaggataatattaagttaagtgaatgttatttttgtgaaaaaattttgagtggatttttatttaggaagataaggttgatttaattttattcgttgtttaaaaagtaggattgtgttttggtgtggtaggtaatattttggaggatag

SEQ ID NO: 675 - DNA, 2483 bp, Artificial Sequence
  chemically treated genomic DNA (Homo sapiens)
atattaaatttagaaaaatagggtggggatacggtagggtttagtagtattattttttgaatatttataaatattgttttttttttagtaggtggagttatttgttgttttttgtttttatgtggttttttttatatttaaagatgggattaggatttgtgttggagaatagttttatttttttttttttattttgttttggtataattaacgaatattttttttttttaaagatagagttttatttttgtcgtttaggttggagtataatggtataattttagtttattgtagttttcgttttttgggtttaagtgatttttttgttttagttttttaagtagttgggattataggtatatattattatgtttagttaatttttgtatttttagtatagatagggttttattatgttggttaggttggttttaaatttttgattttaggtgatttatttgttttagttttttaaagtgttgggattatcggcgtgagttatcgtatttggtcgttaatatataattaaattttaaatataaatttgtatattggttgattacgtgtatttgtaaaatttttattttttatttttaggaagagggggttttcgtttttattttttatttttatttttgaaattgcgaagaggattataggtaatttgtaggtattttcgttagagcgtttgtgtttttagatatttttttttattgtcggtaattcggttttattgtcgcgtttagttttttttgtttattgttttggtttcggcgtttggaaatcgcgtgtttattaaaacgtgaaggtgaatttcgtaagtttatgtaaattggataggagggagagtagaggtagagattatcgtgtttattcgacgttttgagcgaaaagttacgtgtgtttacgtgacgatggagataggaggattagggttttgtttgtttttttttttgagtttttattgtatttagttttggggtttgggttttcgacggttattatttttttatttgggtttttgcgtagttaagcgtagtttcgtacgtttattttttacgttagtttttgtagcgagagtttggtatgtttttttagggagatgaattttttggtgtttttgaggaagcggcgttcgttgtgtttggagttttagaggtttgggggtattagtcggcgtaggtaggttcgtacgaagtcgtatatttgttaggggttgttgtgttggcggagtagttgtattaggcgacgggggtttgtgttttttttttcgggggtcgttatagagttttggggtttttttcgggtatagatatcggttgttggggtgatcgtagttcgtagcgggtagtgcgttttgaggagtatttcgtaggggtattgcgcgtggtttttaagtagttttagaaataggggtcgtatttgttagtagcgttggggtaggcggggtaatttgcggggagtttttggtatttagggtttggaatttagaaagatggtttttacgagttttcgagcgttagttaggttgggttttagagagttgagtaggaaggagggtcgtagttgttttttgtcgtttgaggagtagaggaagtgtttggtttcggcgtatatcgggggataaggcgtgttttagggacgtggtggtcgcgatgtggatggggggttcgcgtggtgttggcggtttacggatgggtgggagtggcgcgtgttagagagcgtattttttaaagaggtggttttttcggcgggtttggtaggtgatattatatagaaattacggttattcggtttacgcgttttgttcgggtgggtttaggatttttgtttaacgggcgttcgtttcggtttaggggtagcgttacgtttgggttttttgggtaacggtagatttcggttggtattgttttcgcgttttttcgtattcggggttggtaggtttagggggatttcggtttttttgacgttatggttttaggttcgttcgtattttagacgttttcggggtttattagcgtgtggcgggggtcgggtttgagtggtagcgtcgagttggtatagcggcggttcgtatatttggtaggcgtagttgggagttattagtataaagagcgcgtagcgtgttagtaggtgaattagtacgtcgtcgtttacgcggcgtagtagtagtttttacgtttcgttttttcgtagtgcgtcggttatcgtgttgggtaggtagttgcgtacgttggtggtgaaggtttcgggggggttttcgcgggtttcgtttagtagcgcgaagtcgaaggttagtacgtttttcgcgtcgcgttcgtatagtttttgtagtattcgggttattagtttttttaggtaggatatttgcgggggaagcgttttgagtcgtttgcgttgtttttcgtatgtcgttggtttttttcggtcgtttttaattttagtcggacgtcgatttcggggaggtttatttggcggaagga

SEQ ID NO: 676 - DNA, 2483 bp, Artificial Sequence
  chemically treated genomic DNA (Homo sapiens)
ttttttcgttaggtgggttttttcggggtcggcgttcggttggggttgagggcggtcggggggaattagcgatatgcggagagtagcgtaggcgatttagggcgtttttttcgtaggtgttttgtttgaaggagttggtggttcgagtgttgtagaggttgtgcgagcgcggcgcgaagaacgtgttggttttcggtttcgcgttgttggacggggttcgcgggggttttttcgaggtttttattattagcgtgcgtagttatttgtttaatacggtgatcgacgtattgcgggggagcggggcgtgggggttgttgttgcgtcgcgtgggcgacgacgtgttggtttatttgttggtacgttgcgcgttttttgtgttggtggtttttagttgcgtttattaggtgtgcgggtcgtcgttgtattagttcggcgttgttatttaggttcggttttcgttatacgttagtggatttcgaaggcgtttgggatgcgaacgggtttggaattatagcgttagggaggtcggggtttttttgggtttgttagtttcgggtgcgaggaggcgcgggggtagtgttagtcgaagtttgtcgttgtttaagaggtttaggcgtggcgttgtttttgagtcggagcggacgttcgttgggtaggggttttgggtttattcgggtaggacgcgtggatcgagtgatcgtggtttttgtgtggtgttatttgttagattcgtcgaagaagttatttttttggagggtgcgttttttggtacgcgttatttttatttattcgtgggtcgttagtattacgcgggttttttatttatatcgcggttattacgtttttgggatacgttttgtttttcggtgtacgtcgagattaagtattttttttattttttaggcgataaggagtagttgcggtttttttttttatttagttttttgaggtttagtttgattggcgttcggaggttcgtggagattatttttttgggttttaggttttggatgttagggatttttcgtaggttgtttcgtttgttttagcgttattggtaaatgcggtttttgtttttggagttgtttgggaattacgcgtagtgtttttacggggtgttttttaagacgtattgttcgttgcgagttgcggttattttagtagtcggtgtttgtgttcgggagaagttttagggttttgtggcggttttcgaggaggaggatatagattttcgtcgtttggtgtagttgtttcgttagtatagtagtttttggtaggtgtacggtttcgtgcgggtttgtttgcgtcggttggtgtttttaggtttttggggttttaggtataacgaacgtcgtttttttaggaatattaagaagtttatttttttggggaagtatgttaagttttcgttgtaggagttgacgtggaagatgagcgtgcgggattgcgtttggttgcgtaggagtttaggtgaggaggtggtggtcgtcgagggtttaggttttagagttgaatgtagtaggggtttagaaaagggggtaggtagagttttggtttttttgtttttatcgttacgtgggtatacgtggtttttcgtttaggacgtcgagtggatacggtgatttttgtttttgtttttttttttgtttagtttgtataaatttacgaggtttatttttacgttttgatggatacgcggtttttaggcgtcgaggttagagtagtgaatagaggaggttgggcgcggtagtggagtcgggttgtcggtaatggggagaagtgtttggaagtatagacgttttggcgagggtgtttgtaggttatttataatttttttcgtaattttaagggtgggaatgagaggtggggacgagaattttttttttttgggggtgggaggtaagggttttgtaggtgtacgtggttagttaatatgtaggtttgtgtttaagatttaattgtgtgttgacggttaggtgcggtggtttacgtcggtaattttagtattttgggaagttgaggtaggtggattatttgaggttaggagtttgagattagtttgattaatatggtgaaattttatttgtattaaaaatataaaaattagttgggtatggtggtgtgtgtttgtaattttagttatttgggaggttgaggtaggagaattatttgaatttaggaggcggaggttgtagtgagttgagattgtgttattgtattttagtttgggcgataagagtgaaattttgtttttaaaaaaaaaaagtgttcgttgattgtgttaggatagggtagagggagggagataagattgttttttagtatagattttggttttatttttaggtatgaagagggttatatgggagtagaggatagtagatggttttatttgttgaggaagggatagtgtttgtgggtgtttaggggatggtgttgttgggttttgtcgtgtttttattttgtttttttggatttgatgt

SEQ ID NO: 677 - DNA, 2374 bp, Artificial Sequence
  chemically treated genomic DNA (Homo sapiens)
tgaaatttagagaggttaaaggatttttttaaggttatagagttagtaataaatatagtttttattataattttgtttattatagttttgtgtgttcgttttttttatagttatttttattatattagagtttgttttagtatatgattttatttaatagatttttttttttttttttttttttaagcgttaaatatatgttattaaaaaaagtgatatattgggtagtattttaaatttaagtgttttgttaattaaaattatatttaaattttataagtatataggtttagttcgtaaaatagaaaggtataattatttatagttttttaagttttttttgaaattggtgtgtatgttttggaagttttaagaataattattgaaaatttatttattaattttgaatggtttgtaaagtattagttttatttttattttttttagagtttatagttattttttttttggatatattttattttgtagattatgtaaggtaatgtaattaattttaaagtttttttagttttttttaaagtataagaaaattttttaaaatattgaatataaaattaatttttgggaagttttagattttgagaataggaattattttttaattattttttttgattgcgattatttaggttttttatttaaaatgtattaattggaaatatttaaaagaaacgtgggagggggtcggggggtcggaagaaagtggagaatagatatttatatatataaaaaaagggatttgatatatgaataatatttttgtttaacgttaatttttcgtttcgatttaaggtttgatataatttttgttgtttttttgattattttttttgaagagaggggttaaagtcggtacgttttgcggagattgtttttagatttaggaaggggtatattagggtagcggacgatttgtttcgcgttttttaaaattattgttagtttaattagtaaatcgagagggtagttttgagatgtaggatggttagagagttgaaatgagtttgggagttaagagtgggatggggcggacgaataggcgtggggagggtaaataacgtattaggagcgggagtgagaatagggtcgaggtggggttagcgaaaggtaaaaggcgaagagaagaaggggacggggtttcgggtgggatgggcggtagtaaagggggaggggacgcgagaaggttgggggagggggagaagggttcggggcggggcggaagggagtaaagaggcgggatgaagacggttaggtcgggagggtttttatttgtagtttcgttcgttttattttttattgggttttttttatttcgaagcgggtttattcgtgttgtaggaagtgtaggattttcgggagattgtattgggttcgggtcgttttcgtcgtagtcgtttcgtcgtcggtcgcggtagttttcgttagaggttcgagttttttggtatcgtcggcgttcgggtggttgttgttgaagaagacgtcgggattcgtttgttcgtttatggcggtcgtagatattcggggagttgtttcggcgtttagtagcggaggtaatagcggcggtaagtagcgttttttttttttttcgtcgttttcgtttatattttagttagtagggagtagttttttgggcgcgggggtcggtcgagttcgtgacgggtcgggaaatgggttaattgcggcgcgttggcggttcggggtttgtcgggaaatgtagtcgcggggcggggcgcgggttagcgcggttcgggcggtttgtagggttgtgttttagtttgggcgtggtttcgggttcgtttcgtttcggttcgtcgcgtagggggtcggttgggcggggagagcgggttttttttggggtcggttgggcgcgggcgggcgggtttttagtttttttcgtacgcggaagttcgcgggcggcgtattttgttgtatttaaaaatatatatatatatatatatatatatatacggaagttgttacgttaagatatttgttcgagttgtatattttttaaggttttttggtcgttttgtgaaggaataggtttaaagcgagttattcggtgcggtcgcgggatcggggttttttcgttagttgttttgcgtgttttcgtttcggtttcgtgttcggagttttttttattttagacgtttttttattttgttaatttgcgggtcgttgtcgtttttgttttttttttttgattcgaggggtttaaatttgttatttgattagtttttatttttaaggaacgtcgattatttttttaagataacgtcgtagttttttgttgttgtttttaaattgtggtttgttgatagtttatttgaaaaattgtttcgttgaagttttt

SEQ ID NO: 678 - DNA, 2374 bp, Artificial Sequence
  chemically treated genomic DNA (Homo sapiens)
agaaattttaacggagtagttttttagatgggttgttaataaattataatttggaagtagtagtagaaagttgcggcgttgttttagaaaggtgatcggcgttttttagaaatgaaaattggttaggtaataggtttgagtttttcgagttaaaagagaaaggtaagagcgatagcgattcgtagattggtagaatggaggagcgtttagggtgagagaaatttcgaatacgaagtcgaagcgagagtacgtagggtagttggcgggagaatttcggtttcgcggtcgtatcgggtagttcgttttgagtttgtttttttatagaacggttaggaagttttaaaagatgtgtagttcgggtaggtattttggcgtgataattttcgtgtgtgtgtgtgtgtgtgtgtgtgtgtgtttttgaatgtaatagggtgcgtcgttcgcgaattttcgcgtgcgaggaagattggagattcgttcgttcgcgtttagtcggttttagaggaaattcgtttttttcgtttagtcggttttttacgcggcgagtcggggcggggcgggttcgaggttacgtttaagttgaggtatagttttataggtcgttcgggtcgcgttagttcgcgtttcgtttcgcgattatatttttcggtaagtttcgggtcgttagcgcgtcgtagttgatttatttttcggttcgttacgggttcggtcggttttcgcgtttaggaggttgttttttgttgattggggtgtgggcgggagcggcggagggaggaggaggcgttgtttgtcgtcgttgttgttttcgttgttgggcgtcggggtagtttttcgggtatttgcggtcgttatggacgagtaggcgggtttcggcgttttttttagtaataattattcgggcgtcggcggtgttaaggggttcgggtttttggcggaggttgtcgcggtcggcgacggggcggttgcggcgggggcggttcgagtttagtatagtttttcggggattttgtattttttgtagtacgagtgggttcgtttcgaggtggagagagtttagtgggaggtggagcgggcggagttgtaggtaaagattttttcggtttggtcgtttttatttcgtttttttgttttttttcgtttcgtttcggattttttttttttttttttagttttttcgcgttttttttttttttgttgtcgtttattttattcggagtttcgtttttttttttttttcgttttttgtttttcgttgattttatttcgattttgtttttattttcgtttttggtgcgttgtttattttttttacgtttgttcgttcgttttattttatttttaatttttagatttattttaattttttggttattttgtattttagggttgttttttcggtttattaattgggttggtagtagttttgagagacgcggagtaaatcgttcgttgttttggtgtgtttttttttaggtttagagatagttttcgtagaacgtgtcggttttggtttttttttttaaggaaggtgattaagaagataatagaagttgtgttaggttttgagtcgaggcgagaagttgacgttgggtaaaagtgttatttatatattagatttttttttttatatatgtaaatgtttgttttttattttttttcgatttttcggtttttttttacgttttttttaggtatttttaattaatgtattttgaatgaaggatttagatgatcgtagttagagagaatggttaagaggtggtttttgtttttagaatttgaaattttttaagggttaattttatgtttagtgttttgggagatttttttgtgttttaaaaggaattaaagggattttgaagttagttatattgttttgtataatttgtaagataaagtatatttagggaggagataattgtgggttttgaaaagaatgaaagtgaggttgatattttataagttatttagaattggtgaataggtttttagtggttgtttttaaaatttttagggtatatatattaattttaaaaggaatttaaagaattatgaatagttgtgtttttttgttttacgggttaagtttgtatatttatgaaatttgagtatagttttagttggtaaaatatttgagtttaaaatgttatttagtgtgttattttttttggtaatatgtatttggcgtttaagaaaaaaaagaagaggagaaatttgttaaatagaattatgtgttggaataggttttggtgtagtggaagtggttgtggaaagagcgaatatataaggttgtagtagataaggttatagtaagggttgtgtttgttgttagttttgtgattttgaggaaattttttaatttttttgggtttta

SEQ ID NO: 679 - DNA, 2414 bp, Artificial Sequence
  chemically treated genomic DNA (Homo sapiens)
gcgtgtatttgtaagtttagattttattttttttttttttttttttttttttgagatggggtttttgtttgttatttaggttggagtgttgttatgtgatttcggtttattgtaattttcgttttttagatttaagcgatttttttgttttagttttttgagtagttgtgattataggtatgtattattatgtttagttaatgtatatatatatattttttattagagatggggttttatcgtgttggttaggttgatttcgaatttttgatttcgtgatttgtttattttggttttttaaagtgttgggattatagacgtgagttaatttattcggtttatttttttattttatttatagtaagtttggatttgtttggaataaaataaataattaaatataattttaaagatatttttgttgaatagtgtattttggggataaattatgtaaaataatataaattaaagaaataggaaggaaaaataaaatggttagaaggttgataataaagtgtattataaaaatagtttttaaagagtttgtattttatttttgtttataaataattagttagttagattattgtttgagaatttataatttttagaaagtggattattttttttaatattaagaaattagggttgtgtacggtggtttatgtttgtaattttagtaggtcgggattatttgagtttaggagttcgagattagtttaggtaatatagtgaaatttcgtcgttataaaataaaataaaataaaataaaaaattaaaaattggttaggcgtggtggtataggtttatagttttagttatttgggaggttgaggtaggaggatcgtttgaggtagaggttgtagtgggttaagatcgtgttattgttttttattttgggcgatagagtaagattttattttttaaaaaaaaaagtttgtttggaagtttttattttatatttaattgttaaattttttttttttattttttgattttatttttttttatatttttaagttaagaatgatgagaaatggatagatgttagtacgagttgggtgcgttttgggtatggggaagtttgaggtttcggaaaattttttttatatatatattcggtttttattttttggacgtacgtagtaaatttttaaaataaaattattaaaaaggagaagggggggcgtcgtttatcgtttttggtatttcgcggttgttaatttttttttttttatttggtttttgggatgttcgcgggggaatcgtagtgagtagcgcggggcgaggtcgtcgcggacgtttcgtcggatgtgtttttcgttgggtcgagcggcgtagggttggagagggaagcgttcgtgtttattttgttcgtaggtgtttttgttgatttgggtgatggtttttttttcgcggttttcggttttttggttggcggcgcgtagttggtagtcgttcgggtaggtggtgtcgtcgttgtcgtatatcgggtagcggtttttgtatacgtatacgtcgtttatattcggatcgtcggttgttgtttcggttttattttttcgttttttgcggttttttacgtattttatgttcggcgcgtagtattttttgtcggcgtcgttattttcgtacggttcgttttcgtcgcgggcgtatatagggtagtagtcgtacgcgtcgcgggtttcgtttagtaggtagtttagcgggggtaggggcgggtaggaggtcggttcgtaggggtcgtaggtgttcgaagaggaggaagaggagaggggtaggagtaggagtagtagtttagcggcgtcgaggagtagggcgcgtagcgacggtcgttttatggcggggtgcggtggtagcggtaagggcgcgagtgagtcgtgtcgggtcggtcggcgttttaaattcgtcgtttcgttcggtttgttcgcgggaattatatttcggggcggtgagagtacgggggtttcgttcgtgtcgttttttcggtttcgcggggtttgcgcgcgcgtttttgttggcgtcggggggtgagcgggtattcggcgtgatcggtttatgggcgttcggttttacgttcgtttcgtagagtttatttcgttagtttttgttcggtttttagttttttgtttcgagtttttagggatcgtatcgtagtgcgagcggtttttttattttttggttttttttcgttttcggttaatatatttaaattttttaataattacggtttcgagacgatttagggttttatttattaaatttttcgtgggtttgagatatttgagtgtttattattttgtggtttgggaagtttttttaagaataagttgttaaaaatttttatttgtggattgtgttttcgttggttataggtttgttgtggttttgggtgttaagtattaaaagga

SEQ ID NO: 680 - DNA, 2414 bp, Artificial Sequence
  chemically treated genomic DNA (Homo sapiens)
tttttttagtgtttgatatttaagattatagtaggtttgtggttagcggggatatagtttataagtgggggtttttaatagtttgtttttaagagagttttttaaattatagagtaatgagtatttaggtgttttaggtttacggaggatttaatagatgaaattttggatcgtttcgaagtcgtggttgttaagaagtttaaatatattgatcggaaacggggagaaattagagggtggaagagtcgttcgtattgcggtgcgatttttgagggttcggggtaggggattggggatcgagtaggagttggcggggtgagttttgcgaagcgggcgtgagatcgagcgtttatgggtcggttacgtcgggtgttcgtttatttttcgacgttagtaggagcgcgcgcgtaggtttcgcggggtcgggagggcggtacgggcggggttttcgtgtttttatcgtttcggggtgtggttttcgcggataggtcgggcggggcggcgggtttaaggcgtcggtcggttcgatacggtttattcgcgtttttgtcgttgttatcgtatttcgttatggagcggtcgtcgttgcgcgttttgtttttcggcgtcgttgggttgttgtttttgtttttgttttttttttttttttttttttcggatatttgcggtttttgcgagtcggttttttgttcgtttttgttttcgttgggttgtttgttgggcgagattcgcgacgcgtgcggttgttgttttatgtgcgttcgcggcgagggcgagtcgtgcgggggtggcggcgtcggtagggggtattgcgcgtcgggtatggagtgcgtgaagagtcgtaagaggcggaagggtaaagtcggggtagtagtcggcggttcgggtgtaagcggcgtgtgcgtgtgtaagagtcgttattcggtgtgcggtagcgacggtattatttattcgagcggttgttagttgcgcgtcgttagttagagggtcgagagtcgcggggagaaggttattatttaggttagtaagggtatttgcgagtaaggtgggtacgagcgtttttttttttaattttgcgtcgttcggtttagcgaagggtatattcgacggggcgttcgcggcggtttcgtttcgcgttgtttattgcgattttttcgcgggtattttaggagttagatgggagggaaagagttggtagtcgcggaatgttaggagcggtgggcgacgttttttttttttttttttggtggttttattttgagagtttgttgcgtgcgtttagaaagtgagggtcgggtgtatatgtagaaaagatttttcgagattttagatttttttatgtttaaagcgtatttaattcgtgttaatatttgtttattttttattatttttggtttggggatgtagagagaggtgaagttaagagatgggggaaaggagtttgataattaaatataaagtaaggatttttagatagatttttttttttaaaagataggattttgttttgtcgtttagggtggagggtagtggtacgattttggtttattgtaatttttgttttaagcgatttttttgttttagttttttaagtagttgggattataagtttgtgttattacgtttggttaatttttggttttttgttttgttttgttttgttttatagcgacggagttttattatgttgtttaggttggtttcgaatttttgagtttaagtaatttcggtttgttgggattataggtataaattatcgtgtatagttttgattttttagtattgaagaaaatagtttattttttaaaaattataggtttttaaatagtaatttaattagttaattatttgtgggtaaaaataaaatataaattttttgaagattgtttttgtgatgtattttgttgttaattttttgattattttgttttttttttttatttttttgatttgtattgttttgtataatttgtttttaggatatattgtttagtagaaatgtttttgagattatgtttgattgtttattttattttaaataagtttaagtttgttgtaaatgaaataaggaaataggtcgggtgggttggtttacgtttgtaattttagtattttgggaggttaagatgggtagattacgaggttaggagttcgagattagtttgattaatacggtgaaattttatttttaataaaaaatatatatatatatattagttgggtatggtggtgtatgtttgtaattatagttatttaggaggttgaggtaggagaatcgtttgaatttgggaggcggaggttgtagtgagtcgagattatatgatagtattttagtttgggtgatagatagagattttattttaaaaaaaaaagaaagaaagaagaaaataaagtttggatttgtaaatatacgt

SEQ ID NO: 681 - DNA, 2479 bp, Artificial Sequence
  chemically treated genomic DNA (Homo sapiens)
ttatttagttgaagatagaagtattttgaagaagtttgtttttgttaataatatttaaatttagagaagaaattttgttggatttttgggaggcgagaaggagaagtagaggagaagttgttaaaatgatatttttttttttatttttttatggttaattttttattttagggtttgataaggaggtatgttagtttttagtaatagaggttttggtatttttttgttttttaaggtaatgagtagaatttttgagaagatagttacgtgaagagtgtgtttcgggaggttagatttgaggtaggaggtttttagtttttattggcggttttggggtagatagttataaggatttaataaattattattttgataaattgaaggttagaggtgggttttttattttttagaggttatgaaaatttttaggttttaggatatattttatgggggaaggggaagtatttaaattttattgatatgaaatttttttttaggttggtagaatggggattggagttcgtttttattatggggaatgaaaatagtaatgttttttgtatagttgatattttgaggtgaaatgtagatttgtggggtattttaataaagtgtagaattttagaatagtgtatatttgtgttatagattagttataattgttggaattggagttaatttagtttttaaaaaaggttatcgtttcgttagagagaggattatggattttgtatacgttttggtgatttagggtggaggggcggggtggcggggagggtagtaggtttatgttttaaatttttgaggtagatagagaaggaaggaaggaaataagggtagatgttagagtatatttataagattaatttttttgatttttatgtaaatatttagaaagggagagatatataaagttatttttaaggtttttattttgagttttgaattgttaaaataaataaaaatatttaagtggggggggaacggaagtttatttggaagaggaaagagagtagttggtgttgttggagttatgagatttaggatattttcgttttttaagtttggatgtgttttttagggtagtatgttggtacggagcgggatggttgatttttataagatggaaatgattgtatgttggaaattgagatgttttaggggagagaagattttaatttaaaagaaaggatataaatttttaatgtgttaaatttgttgattgtaagatgttgtagtaatggttagtatttgtagtattaaatgggtacgtttaaggggttcgggttttgaaattagttacgttatttaaataaattttatttgagtttcgtggttgaatgtttgagatttttagaagaagtttataaagattttgttggaaattgaagaggattttagatacgttaaagatatgtcggttattacgtagagattagaatttttagtgttgagagttttggttgggagaattttatatttttaagaattagtaattaagggattttatttttttgttaaataggtatattattaaatttgatgggtatgttaagggagaagatgatttgggaaaggagttgtttagggagtaagtgttttgttgtagaggtagagattgttaagatggtttttttggggtttgaggtataaagttttttttagttattttagttataaggaggtgggaacgttgtgttaaattgtatttaagaagataatttataaggtaaggaatacggaagttagggtgtgttgggtaagtaagtagaggttgtttgttttatcgaaagtggggttgttttggttttataagggtttagttttggttggtatatgttttttttgttatattagataggtgagattaagaagggaagatagaaagagattttattatttaatatgggtaaatatttataggaggttattttttaatttgtggtgtttagaaatttggtagggatagggtggttgtatggggagggatgttagagaatggagaacgagtttattttattggtttaaatttaatttttatgtggttttttttaaataaattataagtttagtgagttagttaggttagtgtagagagatattttcgtatgttagaggtagatttatattggttttttagtttgtttttggacggtttttttttattttaattataatgttgttgttaggttgatttttttaatatgtaaatatgtttttgttatttgtttgtttggaattttttaatggttttattaggtttttgtcgattgtaacgaaaagttttgtttaattagaattattgaaagttgttaattaggagagtaatatgtttaggtttgtgttatagaaagaaattgagagagtagatatatagattatttttttggatttattagttatatatattaaaatggttaaatagtaatttaaatagtaaaataaataaaaaatttaattgtgtatatatatatattaa

SEQ ID NO: 682 - DNA, 2479 bp, Artificial Sequence
  chemically treated genomic DNA (Homo sapiens)
ttggtgtgtgtgtgtgtatagttgggttttttgtttgttttgttatttgaattattgtttggttattttaatgtatataattgataaatttaggaggataatttgtatgtttgtttttttagtttttttttataatataagtttgaatatattgtttttttgattaataatttttagtggttttgattagataagatttttcgttgtagtcgatagaaatttaatgggattattgaagaattttaaataggtaagtgataggaatatatttgtatgttagaagaattagtttggtagtagtattgtgattagaatgaaggggaatcgtttaaaaatagattggggaattaatatggatttgtttttagtatgcggaaatatttttttatattgatttaattgatttattaagtttgtggtttgtttaaaggaagttatatgaaaattgagtttgggttaatagagtgaattcgttttttattttttagtatttttttttatgtaattattttatttttgttaagtttttgggtattatagattggaaagtagttttttgtaggtatttgtttatgttaagtggtggggtttttttttgttttttttttttggttttatttgtttggtgtgataagggaagtatgtgttaattaaggttagatttttgtgagattagagtagttttattttcggtaaagtaagtaatttttgtttatttgtttaatatattttagttttcgtgttttttgttttgtgagttatttttttgggtataatttaatatagcgtttttatttttttataattaaaatagttagagggggttttgtgttttaaattttaaggagattattttggtaatttttgtttttgtaatagggtatttgttttttgggtaattttttttttaggttatttttttttttgatatgtttattagatttaatagtgtgtttatttggtagaaaaatggggttttttggttgttgatttttaggaatgtgaggtttttttagttagagtttttagtattaaaagttttagtttttgcgtaatggtcggtatatttttggcgtatttaaaattttttttagtttttagtagggtttttataagttttttttgaaggttttagatatttagttacggaatttaagtggaatttgtttggataacgtgattgattttaaagttcggattttttagacgtgtttatttggtgttgtaagtattgattattattataatattttatagttaataaatttgatatattaaagatttatatttttttttttgggttaggatttttttttttttaaagtattttagtttttagtatgtaattatttttattttatggaaattagttatttcgtttcgtgttagtatgttattttgggaggtatatttaggtttgggaaacgggggtgttttggattttatgattttagtagtattagttgttttttttttttttttaagtagattttcgttttttttttatttgggtgtttttgtttgttttagtaatttagagtttaagataaagattttaaagataattttgtgtgtttttttttttttaggtatttgtataggaattagaggagttaattttgtgagtatattttaatatttgtttttgtttttttttttttttttttatttgttttaggggtttaaagtataagtttgttgtttttttcgttatttcgtttttttattttaggttattagagcgtatgtagagtttatggttttttttttaacgaagcggtggttttttttgaaaattagattggttttagttttagtagttgtagttagtttatagtatagatgtgtattgttttaagattttgtattttattgaggtgttttataagtttgtattttattttagagtgttaattatgtaagaagtattattgtttttattttttataatgaaaacggattttagtttttattttgttaatttagaggaaaattttatgttagtaagatttaggtgttttttttttttttatggagtgtgttttaggatttggagatttttatggtttttggaagatgaggaatttatttttgatttttagtttattaaagtagtgatttattgaatttttgtagttgtttgttttagggtcgttagtgagggttggaaattttttgttttaggtttggtttttcgaggtatattttttacgtagttgtttttttaaggattttatttattgttttagggaatagaggggtgttagggtttttattgttggggattgatatatttttttattaggttttgggatggggggttggttatggggggatggaagggagagtgttattttggtagttttttttttgtttttttttttcgttttttagaagtttagtagaattttttttttgggtttagatattgttaataaagatagatttttttagaatgtttttgtttttagttggatga

SEQ ID NO: 683 - DNA, 2243 bp, Artificial Sequence
  chemically treated genomic DNA (Homo sapiens)
aaggtgttttgttaagtgattttggggagagtagttttttgttttagttttattttttttcgttttagtttttaagggtattgtttattttagttttattttagggttttaaaattggtttttatgtttttgtttttttttttttttggttttttttttttttttttttttttttattaaatttattttttgggtattttatttttggttatttagattttttggtatttagtagtttatagtttttttttagatttgttaatgagttttgtttattgtaaagagggttattgatttttattaataatggaatttttagtgtttttttagtaattttagggatgttgatgtggggtttttgggaaataggatttgagtatgtgagttttagttttatagagagagggttagtgagtgttgggaggggattgtgtattgtttttaagttgtatattttgttgattatttaataattttttttatatttgtataatttttttttatttttatatttttttgtttattatttttagatttatatatgatttaagtaataaagttttatttgtaaatgggaaattttttaattagagggtgagggtgatttgtttaaggttatatagtaaaatgtattttttaatattgagaagttagatatcgatttatataggtattaaggaagttggggaagtttttttttattatcgttagtaggtttggttttttaattttgttattacgtttggtgtatttgtgaaatatgtcgattatgtttattatggattttttagtttgagtgttgtttatttttgtttttaaaaagtttttaggaaataaagataattatttttttttttttatttaagttagggtttttatttgggagtgttggaaggagggttgaggatagagtaaaaatacggataaggtgtagtagaacgaatttaatttttttttaatgtgatgggataagttgtttaaaaatgagagggtaggattaagtttgagatttggtttattttggttagggttaagaggagatgtaggtggatggcggaagtttagttgtggatagtgttttagagagggagaagtagggagagtcgggcgttagtaatatatggaagaattaagttgggatattttagttttagttagtatatggtagattttatttttaaaagagtattaaatttattttttttagttttatagtcggggtgatagttatgggggtaggataatggttttggtgatttggtgtttgatttttttcggttgttttaggaattagatatcgtgggttttattttgatttaagtgtaagttttgtatgatacggtgtgtgtaggttttaggtgtatatgtgagcgtggacgtgagtgttagtaggaaatatagttttgtttcgagtatagggggttttttttgtatttttttgggaacgagaaataggaatggtttttgttataaggaatagaaataattttttggtttttaagttgttggacggggtgggagtgaggtgggagttattttatgtttgtttttgggaattatttgtattttttgaattattaagttttgattgtttaaataaaaatgtttgattttttaaagtagattttttagttagtagttagtttgggttggtttgtattttaagtttgaaaaataggatagtgtagtttttattttttatattttttaaagaattaggaaaggattttggttaatgtatatgggtgtttgataataaatttttaatattttttaatgtaggagaaagttttatgtcggtaattgattaagaggagttatttagagtttttttgaatttgaggttaaggttagagggtaagttttgtgtttagagggtgattgataatttgtaggttgtggtagggagtgacggagcgttggttttttaatattttatttaggtaggggtaagttatttggttagggttatgttgtgtcggggttttaggtttgggggtttggagagtttttaaagtatttataggggatttttagttttttattttttgtggagttggagttggggaggggatttagtaatcgggattttaataggaggatgaatttagggaggaagaggatagggagggttttgtgtttaggttttattggggatatttttataggagttgttttaggagattttaaaggagtaatggataggtttggtttagttatttggttatatagacgtgggtttt

SEQ ID NO: 684 - DNA, 2243 bp, Artificial Sequence
  chemically treated genomic DNA (Homo sapiens)
aaagtttacgtttgtataattaggtggttgaattagatttgtttattgtttttttgggattttttgaggtaatttttgtggaaatgtttttagtgggatttgagtataggattttttttgttttttttttttttggatttatttttttgttggggtttcggttgttaaattttttttttagttttagttttatagagggtggagggttaggggttttttgtgaatgttttggaggttttttaaatttttaggtttgggatttcgatatagtatagttttggttagatggtttgtttttatttgggtaaggtattgagaaattaacgtttcgttattttttattataatttgtaaattgttagttattttttgggtatagggtttgttttttggttttggttttagatttaaaaaagttttgggtggttttttttagttagttgtcggtatggagtttttttttgtattgagaggtgttgggggtttattgttagatatttatatgtattagttaaggtttttttttggttttttggaaagtgtgggaagtgagaattgtattgttttattttttaggtttggggtgtaggttagtttagattgattattggttgaaagatttgttttgggaagttagatatttttatttaaatagttaaggtttggtgatttagagggtgtagataatttttaagagtagatatgaagtgatttttattttatttttatttcgtttagtagtttaagaattagagagttatttttgttttttgtaatagaggttatttttgtttttcgtttttaagggaatataagaagggttttttgtgttcgggataggattgtgttttttgttaatatttacgtttacgtttatatgtgtatttggagtttgtatatatcgtgttatgtagggtttgtatttgagttaaggtggggtttacggtgtttggtttttgaagtagtcgaggagggttagatattagattattaaggttattgttttgtttttatgattgttatttcgattgtgaagttggaggagatggatttggtgtttttttaagagtggggtttgttatgtgttggttgaggttggggtgttttagtttagtttttttatgtgttgttggcgttcgattttttttgtttttttttttttgaagtattgtttatagttggattttcgttatttatttgtatttttttttggttttggttaggatgggttaggttttagatttggttttatttttttatttttgagtaatttattttattatattaaaaaaaaattgagttcgttttgttatattttattcgtgtttttattttgtttttagttttttttttagtatttttaaatagagattttaatttaaatgaagggaaaaaaatgattgtttttattttttgaaggttttttgaaagtaaagatgagtaatatttaagttgagaggtttataataggtatgatcgatatgttttataaatatattagacgtgatgataagattgagaagttaagtttgttgacgatgatgaaggagaatttttttaatttttttagtgtttgtgtgagtcggtgtttagttttttaatgttggaggatatattttgttatgtggttttggatagattatttttattttttgattaaaaaattttttatttgtaaatagggttttattatttggattatatgtgaatttaaggatggtaggtaaaaaagtatgaaaatgggaaagagttatatagatataaaggaggttattagatggttagtaaagtgtgtagtttgagggtagtgtatagtttttttttagtatttattgattttttttttgtgagattgaaatttatatgtttaggttttgttttttaaaggttttatattaatatttttgagattattgggaaagtattagaagttttattgttagtagaaattaatagttttttttgtaataaataagatttattagtaaatttgaaaaaaaattgtgggttattaggtattaaagggtttagatgattaagagtaggatatttagaagatgagtttggtggaaaaggagaagaaaggagaggaggttagagaaagaagagaataaaagtatgagggttaattttgaggttttggggtagaattaaggtaggtagtgtttttagaggttgggacgggaaagagtgaggttggggtaggggattgttttttttaaggttatttaatagagtatttt

SEQ ID NO: 685 - DNA, 2279 bp, Artificial Sequence
  chemically treated genomic DNA (Homo sapiens)
gatttgcgtataggagcggggtgcgggggcgtagggagtgtgggtaataggtatagatttcgtttgcgtaatacgtggtaagaaattagttgtgaggggttggtttaacgtagagcggcgcgaggttcgtttggtatttataataatcgaggggttagtttagaagtttaaggcggggttataggttggggaggaattgttaaattgtggatttttttttatttgttggaataagttttaggtaaaattttgttaataaaaatcggtttaattgattttagacgaaagtttaaaagtagtttaatgtaggatagataattttttttataaatgatattgaaaagataggatatttatagattttttttcgttaaaaataatttttatataaaaattaagtggttagatataattgtgacgagtaaaattataaaacggttttaaaaaataataaattattgtttaaggttaggtaaaaggtttttaaattgatattagtggtaagatcggtaaaaagaaatgttgatgaattagattttataaatttaaaatttttgttttgtgaaagattttgtaacgatattgaaaaggtttatttaggagaaaatatttataagttatatatttggtatataattagtatttagaatatgtaaataatttaaaaattaattatttttaaaaatttaattagaaaatagttagaagatataaatagatattttattgaagatatgtagatggtaaataattatatgaaaatttttaatgttattagttattagagaaatgggaatacgaggttttcgttgtttttcgttttttattagggcgggttgagggtttggttttagtagtttcgggtgttttttattttttgggcgtaatgttattattttggtagaattttcgtcgaattttcgtaggacgttttatcgggttcgttagcggttaggaagttcgattgtgtcgtttttttttttttttgcgttttttatcgttagttttttttttaaatgcgtttgcgtttgttttttatattttcgagtttcgtttggttttttttttttttgtttgtgagcgtttggcggcggatgtattgaaagttgcgtattatcgtttatcgagcgttttggggagtgtgtggaagttgttggtagtaggttttgatagtagtattttatgggtttagtcgttgacggtagtatttggttttgtgtgttttagttagttgaggttagggtgtgtggtgtgggttattggtattgtttttttgttattataatttttttttttattaggtatttggtgcgtagaagtttaaagatttgtgaggtttagtttggcgtttgtaattttagagaataaggaggttgaggttaggagttagagattagtttgggtaatatggggagaatttgtttttattttaaaaaaatttagtttagtgtggtggtggtcgtttgtagttttagttatttgggaggttgatgtgggaggattatttgagttttttatattaaggagatcgaggttgtagtgagtcgtgattatagttattgtattttaatttgagtaataaagtgagaatttgttttaaaataaattttaatttgattttggtatagtattatatgataggtagtagttttaagggcgattaaagtattttattttaaaatatatttttgatatattttggaatggttttgtgtaaagttattttttgcgagggaaatttgtgttttgtggataatttttttttttttttaggtttttttttgattcgggagagatttaattaagagtttgatatcgtttaaggttatttattttttgaggtatatatgttatttattttttttgaagtatattataggttttatatatgtaataagaattttggtttttataattttttttttgttattattggttaaatttttttttttttaaaatgtatcggttttttaggttaaattaatgtatattttatatatattgattgatgtttttgtttgtattttttgtttttttaaaatgtataaaagaaaattatagtttaaatattttggatatatgtttttaggattttttgatgttgtgttataggtcgtggttatttatatttggtttagaataaatttttaaatattttatagagtttggttttttttattgggtttttttatttattttattggtattagtttatattttttttgtttaattatatttttatattgttgtttatattttattaattttaagttaaaaat

SEQ ID NO: 686 - DNA, 2279 bp, Artificial Sequence
  chemically treated genomic DNA (Homo sapiens)
atttttaatttaggattaataaaatatagatagtaatgtagaaatatgattggatagaaagagtatgagttaatgttaataaaatgagtggggaaatttagtgaaaaaagttaaattttgtaaaatatttagaggtttattttgagttaaatatgagtgattacggtttgtgatatagtattaggaggttttgagaatatgtgtttaaggtgtttggattatagtttttttttatatattttaggaagatagaagatataggtaaaaatattagttaatatatgtaaggtatatattggtttgatttggaaagtcggtatattttggaggaggaggggtttggttagtggtggtaggagggaggttgtggaagttagggtttttgttatatatgtgaagtttgtaatatgttttagaaagaatagatggtatatgtattttaaaaggtaaatgattttaaacggtgttagatttttagttaaatttttttcggattagagaaagatttggaaagggaaggagattgtttatagaatataaatttttttcgtaaaagatagttttgtataggattattttaaaatatgttagaaatatattttggggtaaaatattttgatcgtttttagggttgttatttgttatgtgatgttatattagaattaggttggaatttgttttgagataggtttttattttgttgtttagattggagtatagtggttgtgattacggtttattgtagtttcgatttttttgatgtgggaggtttaagtgatttttttatattagttttttaaatagttgggattataggcggttattattatattgggttaaatttttttaaagtagagataagttttttttatgttgtttaggttggtttttaatttttggttttaatttttttattttttaggattataggcgttaggttagattttataggtttttagatttttacgtattaggtatttggtagggggagggattatagtggtagaagagtagtattagtggtttatattatatattttggttttagttggttggggtatataaaattaggtgttatcgttaacgattaggtttatagggtattgttgttaaaatttgttgttaataatttttatatattttttaaaacgttcggtaggcggtggtgcgtagtttttaatgtattcgtcgttaggcgtttataggtaagggagaaagaagttagacggagttcggagatgtggagggtagacgtaggcgtatttggaaaagggattggcggtgggaggcgtagagggaaaaaggaacgatataatcgggttttttagtcgttggcggattcgatggggcgttttgcgagggttcggcgagggttttgttaggatagtagtattgcgtttaaggagtgagaggtattcggggttattggagttagatttttaattcgttttagtgggaggcgaagaataacgaaagtttcgtatttttatttttttaatggttaatgatattaaaggtttttatatggttatttgttatttgtatatttttagtgaagtgtttgtttatgttttttgattattttttaattggatttttaaaaataattgatttttgagttatttatatattttagatattggttgtatgttagatatatggtttgtaaatatttttttttaggtaaatttttttagtatcgttatagggttttttataaagtaaaagttttaaatttatggagtttaatttattaatatttttttttatcggttttgttattaatgttaatttaagaattttttgtttagttttagataatagtttgttgttttttaaaatcgttttgtaattttattcgttatagttatatttagttatttaatttttatgtaagggttatttttggcgggggggaatttatagatgttttgtttttttagtattatttgtggaaaagattatttgttttgtattaaattgtttttggattttcgtttaaaattagttggatcggtttttgttggtaaagttttgtttgaagtttattttaataggtgagaaaaagtttatagtttaatagtttttttttaatttgtaatttcgttttgaatttttggattagtttttcgattgttgtagatgttaagcggatttcgcgtcgttttgcgttgggttagttttttatagttggttttttattacgtattgcgtaagcggaatttatgtttgttatttatattttttgcgttttcgtatttcgtttttgtgcgtaagtt

SEQ ID NO: 687 - DNA, 2407 bp, Artificial Sequence
  chemically treated genomic DNA (Homo sapiens)
gggcgagtgggtgtgtgcggggtgtgcgcggtagagcgcgttagcgagttcggagcgcggagttgggaggagtagcgagcgtcgcgtagaattcgtagcgtcggtttggtagggtagttcggaggtgggtgggtcgcgtcgttagttcgtttgtagggtttttattggtcgtttgtcggtcgtttttcgtttaaaaggcggtaaggagtcgagaggttgtttcggagtgtgaggaggatagtcggatcgagttaacgtcggggattttgtttttttcgcggaggggattcggtaattcgtagcggtagggtttggggtcggcgtttgggagggatttgcgttttttatttattttttagttgtgttttcgtcgtcgtttcggttagttttcggcgttggcgtttatggtcggttttcgatagcgtttcggagggatcgggggagtttttaggcgttcgggtgagtagttaggcgcggtttttcggttttttcgattttcggcgttagtttttgtttttttagttagggcgcggtggggtttgttcgggtagtgtttcgagtaattgggaaggttaaggcggagggaaatttggtttcggggagaagtgcgatcgtagtcgggaggtttttttagtttcgcgggtcgggtgagaataggtggcgtcggttcgattaggcgttttgtgtcggggcgcgaggatttggagcgaattgttgcgtttcggtgggtcgttttttttttttttttgttttttcgggcggtcgtacgtcgggtcggtcgggtaacggagagggagtcgttaggaatgtggttttggggattgtttcgttcggggaaggggagagggtggttacggtgttaggagaggcgcgggagtcgagaggtggcgcgggggtgttatcgttgtcgtaggttggagagagattgtttttagtgaggcgcgtatcgtttgggcgagggttttattttttcgcggcgtttttggaggtgggaaagttgggtgggtatgtgtgtagagaaaggggaggcggggaggttagttattttcggagtcggttttgattttaatagatcgtttagcgtttggggacgtcgatttcggggtgtcgtggtgttcggttttacgcgcgcgcggggttgaggggtcgggggcgtttttggtcgtttagttttaataaagggtgtttttttttatttcgcgaggaggggtagtttcggagattcggtttttagcgagcggggttttagcgtcggggaggtttatttttttttggggttgttattttattattattattgttttttttttttttttaaaaggattggagattgatgtatgagggggttacggaggcgtaggagcggtggtgatggtttgggaagcggagttgaagtgttttgggttttggtgaggcgtgatagtttattatgatcgtgtttaggtaggaaaacgtggatgattattacgatatcggcgaggaatttggtaggtaaagggggtattagaagcgtatttttttggattgtggaaatgtataacgatggggttattgggtggtaaataaatgtagtttgaattaggcgtttttttcgttttttttggagatgcgtaaattatagagaaaagagttattaatttagcggtaaatcgtttgatttaagggtttgggggtggaggagaggtagtagtttagggttagattatgatgtatagtatattgatttagttttttggataaaattagatttaattgttcgtgttaatttttgttagtttttgtttttttgtgataataggataaatattaagattataattgtaattggagttagtttttatgtgtgatttaaacggagggtataaattaattaataggttttaaaaattttagtattttattttttatttaaatttttagtgtaatttgagtaagtattggtaggtggtaaatggagatttgttagatgttgatattgggtttggattttgaaattttttttaattaggaatttaattatttggttggtgttggtggttgttttggttttatttataatgttaaatttttaataaattaatgagagtttaatatggttatttggatttagagtatatttttattgttgtagtagttgtgatttttagtgtaaaattttttagtttttaggtaaataaagaatagtttttttcggggtatttaagggttgattgttgttttttttgattgtgtattagatagagtgttttgggttttggttaattttagtagaaaatttagtttttatatatatatttaaaattgaatttatggaatttgattgtggtgtatttatattgtgagtggagtaggtaaaaggatttttaaataaataaaatatgtatttatttatatgtgtattgaaata

SEQ ID NO: 688 - DNA, 2407 bp, Artificial Sequence
  chemically treated genomic DNA (Homo sapiens)
tattttaatgtatatataagtaaatatatattttgtttgtttaaagatttttttgtttattttatttataatgtaaatatattatagttaaattttataaatttagttttaaatgtatgtatgaaaattaggttttttattaaagttgattagagtttaaaatattttgtttaatatatagttaaaggaaatagtaattagtttttagatgtttcgaaagaaattattttttgtttatttagaaattgaaagattttatattgagaattatagttgttatagtaatggaggtatgttttgaatttagatagttatattagatttttattgatttgttaaaaatttaatattgtaaatgaaattaaagtaattattaatattaattaggtaattaaatttttggttggaagaagttttaaaatttaagtttaatgttaatatttggtaagtttttatttattatttattaatatttgtttaaattatattgaaaatttagatagagggtaaagtattaagatttttaaaatttattaattagtttgtatttttcgtttaaattatatataaaagttaattttaattgtaattataattttagtgtttgttttgttgttatagaagggtaagggttgataagagttagtacggataattaaatttgattttgtttaggggattggattaatatattgtgtattataatttagttttgaattgttgttttttttttatttttaggtttttggattaggcggtttatcgttgggttagtaatttttttttttatgatttgcgtatttttagaaagggcgagggagacgtttgatttaaattgtatttgtttattatttaatggttttatcgttatgtatttttataatttaggagggtacgtttttggtattttttttatttgttaagtttttcgtcggtgtcgtagtaattatttacgtttttttgtttgaatacggttatgataaattgttacgttttattaaagtttagggtattttagtttcgttttttagattattattatcgtttttgcgttttcgtagtttttttatgtattagtttttagtttttttgaagaaaaaaaaaaggtaataataatagtaaaatggtaattttaaaaggaagtagattttttcggcgttaagatttcgttcgttgaagatcgggttttcggagttgttttttttcgcggggtggagaggagtattttttgttaaagttgggcggttagggacgttttcgattttttagtttcgcgcgcgcgtggggtcgggtattacggtatttcgaggtcggcgtttttaaacgttgggcggtttgttgggattagaatcggtttcggaagtgattggttttttcgttttttttttttttgtatatatgtttatttagtttttttatttttagggacgtcgcggaagaatgaagttttcgtttagacggtacgcgttttattgggagtaatttttttttagtttgcggtaacggtggtattttcgcgttatttttcggttttcgcgttttttttaatatcgtggttatttttttttttttttcgagcgaggtagtttttagagttatatttttggcgatttttttttcgttattcggtcgattcggcgtgcggtcgttcgggggagtaagggagggaagggagcggtttatcgaggcgtagtagttcgttttagattttcgcgtttcgatataaagcgtttggtcgggtcggcgttatttgtttttattcggttcgcggggttggggaagtttttcggttgcgatcgtattttttttcgaagttaagttttttttcgttttggtttttttagttgttcgaggtattgttcggataaattttatcgcgttttggttgggaaagtaaaagttggcgtcgggggtcggggggatcggggagtcgcgtttggttatttattcgggcgtttgggagttttttcggttttttcggagcgttgtcggaggtcgattataggcgttagcgtcggagattagtcggggcggcggcgggaatatagttagggagtgagtggggggcgtagattttttttaggcgtcggttttagattttgtcgttgcgagttgtcgagtttttttcgcggagggaataaagttttcggcgttggttcggttcggttgttttttttatatttcgaagtagtttttcggttttttgtcgttttttgggcggagggcggtcggtaggcggttaatggggattttgtaagcgggttggcggcgcggtttatttattttcgagttgttttgttaggtcggcgttgcgggttttgcgcggcgttcgttgttttttttagtttcgcgtttcgggttcgttggcgcgttttatcgcgtatatttcgtatatatttattcgttt

SEQ ID NO: 689 - DNA, 2485 bp, Artificial Sequence
  chemically treated genomic DNA (Homo sapiens)
ggggagagtattggtagtataaggtaaatttttggtatagagagtaaagtttttattgggaggatttttaaggggttatttgggagagggtagggtagtagttaattttttttaagtgggttgaagtaggtgaagaaagtggtagaagttacgcggtggtaaaaaggagttatatattttatttggagacgttttgaagtaattgtacgaaatttgaggatggttaggtagttttataatagtcgtttatagggagagttagaatatagaagaatttagatgattggtagtattattttttttataattttaggtttggggggttgcgatggagttagaggaaatttagtttagaatatttttggtttttataaatataaattaattggaacgttaaattttagtttgttaatttggttattgaaaaaaaatttttttttttttaaaaaatatagttttagtttattttttttttttttgtaaaatttcgtgtatgattttagttttattttttgttaagatatgttaaagtgttgagttattaataaaagaaaaaaagaaagtaaaggaagagtggttttgttttttagcgttagttttaatgacgatttaagttgtatttttttttttagttgtgttttgttatgttaaaggacgttatattgtataattttaataaggtttttaattagttttattcgttttggttttatttttattttttaataaagatttattaaatgtgggatttttttatgagttttaatattagagttttaatttttaataaatataggattggagatgtttgaggtttattttgttttcgagtttatcgggaacgaaagagaagttttattttttttttaggagtttagttatgaattttttttttataagtaagtgtaggaaatttttagttttggaattgttagcggcggtcgagttttgtgtgagggaggggtgtgtggtttagggagggttggcgggcggttagtagtagaggtaggtttttagttgtgttgttagtttatttttgcgttcgttttttttcggtataggcgttttcggtttagttgttttttttttggggttgtttttggtgttgtttgttgttttttttgttttagtatttttaggagaagattttaaagatgtagtcgttttatatagatagttatttatttttttagaacgaattgataaataaattcggtatattttcgacggtattttagttttgagaaaggaggtgggtaggtttggcgatggggttgaagggttcggtgcgtatgcgttttttttgtttttgcgtgtggtcgggggttgtttgtattaggaggtttttgttgggttttagagtattgtagatttgaggttaacggggtcgattagattgatttttgtatttattttttgttggtgttaggaagttttttttttttttggaaaatgtagaatgggtttgaaatttatgtttatttttggtatgagttgagggttattgttttttagggtttttttttttttttttaaaaaattaggtttgtgaagtttttttttgtttttcgggttttggaaggattagaaaagtgttatttgaaaggtatgtttagttttttagagtagttgtagtattttttggttatgtaaatttaatggttaggattttttaaagttattttagttaagatttatattttagagtttattaaagtggtaaattataaataggttaaagtatttttttatttttaatgtaaggtattttggttttgtttggtagaaagaaaagaatataggaggggagattgggagtttatattcgaattttggttttgttaaattagttttgtgattttgggtaaattttttattatttttggattttattagtaaaattgggcgtggattaggtgattttatagattttttttgttggaatattttatggtttgaattatatttttttaattattgttaaaattgttgttattaagtatttattgtgtgttaggtattttaaataaatattgtgtttaatttttaaaataaatttgtaaggaaggtttttggagataaggaaattgagatttaggattaagtaatatatttaaagttataggtgagtttggaattgaatttaagtgtgtttttattttattggaatttgtttgttaggatgttaatgagttgtagttttattttttttagagatttttttggttgtggttgaataatgaaaaggttttttagtggtgtttgttttagggatatttaggtgataataattttggtatttttttttagatatgtaataagagtaatatgtgtgaaagtagtaaagaggtattggtagaaaataatttgaattttttaaagatggttgaaaaagatggatgtttttaatttggatttaatgaggtattaatttgtcgtatttattttttattattttttaggtaaaattttttttttttgtatg

SEQ ID NO: 690 - DNA, 2485 bp, Artificial Sequence
  chemically treated genomic DNA (Homo sapiens)
tatgtaagagggagaagttttgtttaaggaatagtgaaaagtgagtgcgataagttggtattttattgaatttagattggaagtatttattttttttagttatttttggaaggtttaggttgttttttgttagtgtttttttgttgtttttatatatgttatttttgttatatgtttgggaaagaatattagaattgttattatttaagtgtttttaaaataaatattattagagggtttttttattgtttaattatagttaggaaagtttttaagaaaaatgaagttataatttattggtattttggtaagtaaattttagtggagtgggggtatatttgggtttagttttaagtttatttgtgattttaggtgtgttatttaattttgagttttagtttttttatttttaaaaattttttttgtaaatttgttttgaagattagatataatatttatttaaagtgtttggtatatagtagatatttaataatagtaattttgataataattaggagaatataatttaagttatagaatgttttagtaggaaggatttatgagattatttagtttacgtttaattttattgatggagtttagaggtggtagggaatttatttaagattataaggttggtttggtagaattagaattcgagtgtgggtttttaatttttttttttgtgtttttttttttttattaaataggattaaaatattttgtattgaaagtggggagatgttttaatttatttatgatttgttattttggtgggttttgaggtatgaattttagttggaatggttttgaggaattttagttattgagtttatataattaaaaagtattgtaattgttttgagaagttgaatatgttttttaggtggtatttttttagtttttttaaagttcgggggataaaaaggagttttatagatttaattttttggaaagggaaaaggaagttttgagaagtaataatttttagtttatgttaaaggtgggtatggattttagatttattttgtattttttagaaaggaaaggaattttttgatattagtaaaggataaatatagaagttagtttagtcggtttcgttggttttaaatttatagtgttttagaatttagtaaagattttttaatgtaggtagttttcggttatacgtaggggtaaggggaacgtatgcgtatcgggttttttaattttatcgttaagtttatttatttttttttttagggttgagatgtcgtcgaggatgtatcgaatttgtttgttaattcgttttgaagaggtgagtggttgtttgtgtggggcggttatatttttggaatttttttttgggggtattggggtagggaaggtagtaggtaatattaggagtagttttagggagaaggtaattggatcgaaggcgtttgtgtcggaggggagcgagcgtaggggtgagttgatagtatagttgggagtttgtttttgttgttggtcgttcgttagttttttttgggttatatattttttttttatatagggttcgatcgtcgttggtagttttagggttaaggattttttgtatttatttgtggagaaggagtttatagttgggtttttggaggggagatagagtttttttttcgttttcggtgggttcgagggtagaatgagttttagatatttttagttttatatttattgggggttgagattttaatattgagatttatgggaaaattttatatttgataaatttttgttggagggtgagggtggggttagagcgggtggggttgattggaaattttattaagattgtgtaatgtgacgttttttagtatggtaagatataattagggggaaaagtgtagtttaggtcgttattgaggttagcgttaagaagtagaattattttttttttatttttttttttttttttattagtgatttagtattttggtatgttttgataaagagtaaagttgaagttatgtacgaagttttataaagagaaaaaaaataagttaaagttatgttttttgaaaaaaaaaaaatttttttttagtgattagattaataggttagaatttagcgttttagttaatttgtatttgtaaaaattaaagatgttttgaattgagttttttttgattttatcgtagttttttaagtttgggattatgaagaaggtaatattattagttatttgagtttttttgtgttttggttttttttgtgagcggttgttgtagaattgtttggttatttttaaatttcgtgtagttattttaaggcgtttttaggtggagtgtgtgatttttttttgttatcgcgtggtttttgttattttttttatttgttttagtttatttagaggaggttggttgttgttttgtttttttttaagtgattttttgggaatttttttagtgaggattttgttttttgtgttagaggtttgttttgtgttgttagtgtttttttt

SEQ ID NO: 691 - DNA, 2354 bp, Artificial Sequence
  chemically treated genomic DNA (Homo sapiens)
tcgcgtttgtcgttcggcggttgttgtcggtttggttttttttcgttgttgtttaggttgtcgtcggtcggcgagattggcgagttggatacgttttgtattatttttcgagcggcgacgcgtggtttcgcgggttcggggtagaggagaagagcggggcgttttagttcgttagtttttttcgcgcgcggcgtcggttcgggcgatgcggttcgcggaggagagagtaggaggacggacgggagggattttcgcggggagggcgcgcgggggaggcggggagggaggcgggagggggaggggacggtgtggatggtttcgaggtttaaaaagaaagcgtttaacggttggacgtatatttcgttaggttttttggaaacggtgtcggtgttgtagagttcgcgaggtgtttgggagttgggcgagagttgtagatttggaggtttttatattttcgtgtaggcggaaagtttgggggtagtagtgttattggtttgacgtgaggaggagggatttttcgaagttttataggaaagttttcgttttttagtttttttttttcgttttatttttttttttcggggtttaataattcgtttttttaaattatttaaaaacgatttggttcgggcggtcggtttttttattcgttttttagtcgttttttttttttttttttcgtcgttttttttcggcgggcgcggggcgattttttttttcgtcggagcgtgcgggtagcgttttcgaattttagcgtagtttaggaagcggtcggaggagattgttttggtcgcggtggtagttttattcggagtggttgtgatagtagtaatggtaatagtttttatatagtgggtgatgttttatttcgtttaagagttttttaggttcgtggggtcgatttgggattgttggggttgggggggtggtgtggcgcggggtgggggggtatgttaagaaaagtgttaatcgcggagtttatttaatggttaggtagacgaattttttggagttttaaaggttaaatcgcggcggtttagttcggaggttttgggcgtttttgaagacgtggtcgcgtcgcgggggttgaggatttgcgtttcggtttgttttttcgtttttttgggttttttttttttttttataacgatttagtttgacgttttttaatatttaaaggattacgtttcggaaggtgttcgaaagaggtagaagtttatttttcggtggaaggaaatttagtttatgggaaaggtagtagagttagaggggggtagcgtagcgtttttgttgcggttttaatagttggtaatgttaatttaagggagagattttgtggttattttatttttatttttaaattaggtttcgtattgtgattttgaaaggttagtttgtaagagagtgaagtgggaatttgatagcgtttagatataggggttgttcgttttgagatttttttcgttttagtttttattatttagggtatttagtggataattaggtttcgtgagttttaattttaaatgtttggatacgttaatattttaagtatttttgtttgtaagttaaaacgaagagttttaaagagggtgttaatgtagattttggtaaattggaagtagtaaagttggtgaattagaaaggaagtcgttttggataagaagtttattttttgtaatgttatatttgttttttttttgaaatgaattgaggtaaaataatcgttttaggtttattttttatatggtaaagtaaaaagttggagttagtatatagtgttggggtgggggtagcgtttgggggcgacgagttttgtgtatcgcgttggagtattttgtatataaggttcgtttatgggttttttagtacggattcgtcggcgggaataattaattgagtaaagcgtttttttttgggttggagtaaggttcgcggttgtagatattttaagttgaaggtaagagtttaggcgaggcgtaggtaggttacgtggttgttttttgttgagattcgtagttttggttttggaaattttagggtgtggagttgtttgggtcgattgaagggtttagttttttgggagaagtgagggcgagtgttatttttttagcgaggtgtaaataagattgtgtttttatgggagggataaattgtagagttgattttttattatttttatagaaatatttagaaagtgattatagtttgttaattggtttgtttagtgagtcgttgttttattgtaaaattgtttgaaaattagattcgatttgatttttatttaattttagtagtattttagtagtttttaaaatagttatttttgtatttttgcgtttgtatttttcgtt

SEQ ID NO: 692 - DNA, 2354 bp, Artificial Sequence
  chemically treated genomic DNA (Homo sapiens)
agcggaagatgtaaacgtaagggtgtaggggtgattgttttgagaattgttagagtgttattgaaattaagtggaggttaagtcgaatttgatttttagataattttatagtaaggtagcggtttattaaataggttagttgataagttgtagttattttttgagtatttttgtaaaaatggtaagggattaattttgtaatttgttttttttatgaaagtatagttttgtttatatttcgttggagaaataatattcgtttttattttttttaaaaagttgaattttttagtcggtttaagtagttttatattttgaggtttttaagattaaagttgcgagttttagtagggaatagttacgtggtttgtttgcgtttcgtttgggtttttgtttttagtttgagatatttgtagtcgcgaattttgttttagtttagaaaggggcgttttgtttaattaattgttttcgtcggcgagttcgtattgagaagtttatgagcggattttatgtgtagggtattttagcgcggtgtataaaattcgtcgtttttaaacgttgtttttattttaatattgtgtattgattttagttttttattttgttatgtaagggatggatttgaaacggttattttattttaatttattttaaaaaggaaataagtatggtattgtaaaagatgggttttttatttaaggcgattttttttttggtttattaattttgttgtttttagtttgttaggatttatattaatattttttttggggtttttcgttttaatttatagatagaaatgtttaaaatgttagcgtatttaagtatttggaattggggtttacgaagtttaattgtttattggatgttttagatagtgggggttggggcggggggggttttagagcgggtagtttttatgtttaggcgttattaaatttttattttatttttttataagttggttttttaaggttataatgcggagtttaatttgggggtggggatgaaatggttatagggttttttttttgggttggtattgttagttgttagggtcgtagtaaaggcgttgcgttgtttttttttggttttgttgttttttttatggattgggtttttttttatcgaagagtgaatttttgtttttttcgagtatttttcgaggcgtagttttttggatgttggggagcgttagattgggtcgttgtagaggggaaaggagggtttagaagggcgagagagtaggtcgggacgtaaatttttagttttcgcggcgcggttacgtttttagaaacgtttaggattttcgggttgggtcgtcgcggtttggtttttggaattttaaggggttcgtttatttgattattgggtgggtttcgcggttgatattttttttggtatgtttttttatttcgcgttatattatttttttagttttagtaattttaaatcggttttacggatttagagggtttttgggcgagatgagatattatttattgtgtagaagttgttgttattgttgttgttatagttatttcggatggggttgttatcgcggttaggatagtttttttcgatcgttttttgggttgcgttagggttcgggggcgttgttcgtacgtttcggcggggaaggaaatcgtttcgcgttcgtcggaggaaggcgacggggagggaagggggagggcggttaggaggcgggtggaggggtcggtcgttcgggttaggtcgtttttgaatggtttgggaggacgaattgttagatttcgaggaagggaggtgggacgggggagggggattggaaagcggaaatttttttataaaatttcgaaaagttttttttttttacgttaggttaatgatattgttgtttttaaatttttcgtttgtacggaggtataagagtttttaagtttgtagttttcgtttaatttttagatatttcgcgggttttgtagtatcggtatcgtttttaggaggtttggcggggtgtgcgtttagtcgttgggcgttttttttttggatttcggggttatttatatcgttttttttttttttcgttttttttttcgtttttttcgcgcgtttttttcgcggaggtttttttcgttcgtttttttgttttttttttcgcgggtcgtatcgttcgggtcggcgtcgcgcgcgggggaagttggcgggttgaggcgtttcgttttttttttttgtttcgggttcgcgaggttacgcgtcgtcgttcgagagatgatgtaggacgtgtttagttcgttagtttcgtcggtcgacgatagtttgagtaatagcgaggaagagttagatcggtagtagtcgtcgagcggtaagcgcgg

SEQ ID NO: 693 - DNA, 2430 bp, Artificial Sequence
  chemically treated genomic DNA (Homo sapiens)
agttgtaattttaatgaatcgtgattatgttattgtattttagtttaggtgatagagtgagatgttgtttttaaaataaaaaataaagtgaaatttttgattggtataattttgtttttttattagttttatttttaaaaaaattatataagtaaaatatgtttttttagttattattttttaaattagattattttttgtaataattttatgggaattattttacgggagtatagttatttacgtttgtaattttagtattttgggatgttaaggtgggaggattgtttgagtttaggattttgtaattagtttgagtaatatagatttcgtttttataataataataataataataaaaataaaaaaattaatcgggtatgatggtgtgtgtttgtagtttatgttatttgggaggttgaagtgggaagattttttgagttaaggaggtagaggttgtaagtgagttatgatagtattatcgtatttaagtttgggtaagagtgaggttttgttttaataaaaattcgtaaaaaattttgggagtatcgtacggttgttagtgaataaggttataagataaaaaataggatgtttaattaaatttagttaaataagcgttgtatatttttagtgtaagtatatttaaaatattaatgaggtatatttatattaaaataaatatttattgtttatttgaaatgtaaatttaaataggtattttgtatttttatttgttaaatttggtaattttattagtattttaatatgaagttatgagggttgtttggatttatgttggtaggtaagtattaatttattcggttgttttagataggatagaaattattttttttaaaaaaatcgtttattttgacgataggtagtaacgaagtacggaagaattttgattttttgaggaattcgtaattgacgtaagtgttataaatgttattttgattgatttttcgttttttttatttttttttttttgtaattgttttattatttttttttttttaagtttcgtttttttagttatttttaattgttgaggaatcggttgtttaaaaggagtcggtaaaagcgtttacgtggagtttagaggagcggaagtagttagatttgattgagagtcgtaaagcgcggttggttttcgtttttcggataacgattatagtttcgattgttagtgtcggtttttttcgtgtgaggggatttgtcggatttttgtaaatttaattttttttttatttcgggtttttttttatcgtcgttttttttattttggattatgtttaagaagtaaggatatgttgtggtttttatcggttgtttataaaggcggtggggtgggggtggggaagagggcgagagttaagattttttttttttttttttcgtttttgttattttgattttttaaggttttttatagtattatgtttttatttttaatttgaatatttttttaagttttttattcgtagtttttaattgggttttagtttttttatttttattgttttttttttttattttttttttttttttgtttttttttttaattttgtttttatttttagggttttattaattatattcgtgtattgtgatttagaggtatattttttgtagttgagaggggagttttgcgtttattgttatatgtttattagttatgaattgaataaaggaaggtttgattttttgggttatgggagtgaaggagtttgggtgataggaagtaagcggtttgttatgtttattgtttagttgttagattaattttgttttgaaaataacgattgttttataggttatttagtgtaaggaagataaaaattttttgggaatttattagtgggtttgttttttagatttggtagacgtaaaaagtaaagggggaatatgggtaaaggaaggtgggttttgtgtatgaaattttgagtaaaaacgaatagggattttagaaattattattattattatttaaaaaaaattttagtagattatatagtttagtaggggtcgattttttatgttatgtttgggttggttttttgtattttaagaattgagggttttgttttttgattttaggttttattattggtgggagtttgtgtttttttttgggtagaattgaataagattttttaggaaaggtatttgtgtagttaattatagattatggtgtaaagtatgttttatatttttttttttaattttagttaattgttgtatatttgatagtttattttaatattgtattaagatattggttttgtgttggatagagtaaaagggagatggtatttttttttaaaagaataatttattttataattaagtatttaaatatttggttgggaataaatgattaattagaatagtatttttaggtattttgatatttttatttagaaa

SEQ ID NO: 694 - DNA, 2430 bp, Artificial Sequence
  chemically treated genomic DNA (Homo sapiens)
tttttaagtagaggtattagaatatttaaaggtattgttttaattagttatttatttttaattaagtatttagatatttaattatgaaataaattgtttttttaaaaaaaaatattattttttttttattttgtttagtataaaattaatgttttaatataatattgaaataaattgttaagtatatagtaattagttggggttagggggaggaatatgagatatattttgtattataatttgtaattagttatataaatgttttttttggaaaattttatttaattttatttaggaagaaatataggtttttattaataataaaatttgagattagaaaataaaatttttaatttttgagatataaaagattaatttaagtataatatagaaaatcggtttttgttaggttatgtaatttgttgagattttttttaagtgatgataataatgatttttaagatttttattcgtttttgtttaaaattttatgtataaaatttatttttttttgtttatgttttttttttgttttttgcgtttattaaatttggaaggtaaatttattagtaggtttttaaggaatttttgttttttttatattgaatagtttatggggtaatcgttatttttaaggtaaggttaatttggtagttaggtaataggtatgataggtcgtttgttttttgttatttagatttttttatttttatgatttaggaagttaagtttttttttatttagtttataattaataaatatatggtagtgagcgtagggttttttttttagttatagagaatatgtttttaaattatagtgtacggatgtgattggtagaattttaggaatggagatagaattgggggagggggtaaaagagaaagaggggtaaggagaaaaaataatgggagtggagggattgaaatttaattaaggattacggatggaaagtttaaagaagtgtttaagttgggagtgagagtatagtattatagaaaattttagggagttaggatggtaggggcgggggagagagaaagaggattttagttttcgtttttttttttatttttattttatcgtttttgtgagtagtcgatggaggttatagtatgtttttattttttgaatatgatttaaggtgaagggggcgacgatagggaagggttcggaatgggaaagaaattgaatttgtaggggttcggtagatttttttatacgaggaaggtcggtattgatagtcggagttgtagtcgttattcggaaaacgagagttagtcgcgttttacggtttttagttaaatttgattattttcgtttttttggattttacgtaggcgtttttgtcggttttttttaggtaatcggttttttagtagttggaggtagttgaaagggcgggatttgagagggaagaagtgatagagtaattgtaggaagagaagaatggagggggcggagaattaattaaagtagtatttatggtatttgcgttagttacgggttttttaaagggttaagattttttcgtgtttcgttgttatttatcgttaaagtaaacgatttttttagagggaatggtttttgttttgtttgaggtaatcgaatggattggtgtttatttattagtatgaatttaggtaatttttatggttttatgttaaagtgttggtaggattgttaggtttagtaaatgaaaatataggatgtttatttaaatttgtattttaggtaaataatgaatatttgttttagtgtaagtatattttattaatattttggatatatttatattaaaaatatatagcgtttgtttagttgaatttaattgagtattttgttttttattttataattttatttattggtaatcgtacgatgtttttaaagttttttgcgggtttttattgagatagggttttatttttgtttaggtttgaatgcggtggtgttattatggtttatttgtagtttttatttttttggtttaagggatttttttattttagttttttaagtagtatggattataggtatatattattatgttcggttaatttttttatttttattattattattattattgtagagacggggtttatgttgtttaggttggttgtaaagttttgggtttaagtagtttttttattttggtattttaaagtgttggggttataagcgtgaatgattgtgttttcgtagaataatttttatagaattattatagaaggtaatttgatttaagagataatagttaaagagatatgttttatttatgtaatttttttaaaaataaagttgatagagaaataaaattatgttaattaagagttttattttgttttttgttttagagatagtattttattttgttatttaggttggagtgtagtggtatgattacggtttattggagttgtaatt

SEQ ID NO: 695 - DNA, 2500 bp, Artificial Sequence
  chemically treated genomic DNA (Homo sapiens)
ttaaaataagtagggttttttttttggggtattttatttttttttttttttttaaattataaggttttaatagaggagtaaattttatgtggttttttaattgttttaaaagtgattaattattaaatcgaatgtgacgtgtattgttattttttaaggaaaattttgagtagttttgaaagatagaattataaaagggaaaaattatttttttagggttagtttttttataaaataaatttgttttggggtttttttttggaaaaatatatatagggttttaagtgtgtgtaggttgattggttatataattatttgaatttagtttcgaaaatagtttttttttgtgtttttaatgtaaaggaataattaaaatttaaagcgtattttttttaattagtcgaaagttttagtaatgtatggtattgtgggtatttaggagttaaaatgtttttatttataaaaaatgatttaaataatggttcgtgtttaagtttttatatttgttttgtagagaagttttggttggtagaggtaggatttgtaattttttgggtcgtttgattttacgaggggcgaggtatgtattgtagcgatacggattatttgtgaagtttttgggcgggagtcgtttaaagattaattttttcgggttttcgttattaaaagcgttttcgtgaatagcgtgattggaaatttgtgcgggtcggagatcgcggcgcggttgtttttttaataggcgatttgtttttttgttcgaggtttatttttatgtaaagagtttgatattagagtattttttgttgttaaacgttttttttagtttcgagggagagagttatgtggagttggaagagtttattttgaagagaggggtttcggggagttttttttaagatttagaggtttcgcggttatttttgtcgggttttgttaagatttgttagaaggaacgagtcgcgtgttttagttagttggttttcgttataggaagaaacgtttttgtagtgggtttaattgtttttgggtcgagcgaatttttcgtcgtataatttagtggtgcggattttgttttttgttattttgttgttgcgtcgagcggggtgggaaagtttttggagttgttagtcgcgtagttcgtggttatttagattcgaggtgcgggcgtttgcgaagggttttcgcggggtggtcggggtcgtcggggtatgtagcgcgggggcgcggttcggtgacgtcgcgggcggggattcggtattcgggtaggttgcgcgcgggtgcggggcgagggcgtcgcggggattgggacgtacggttcgcgcgcgggatacggttatggaggacgcgggagtagttggttcggggtcggagtttgagttcgagttcgagtcggagttcgagttcgcgtcggagtcggaatcggagtttaagtcgggtgttggtatattcgaggcgttttttcgattttggatcgacgtgatgggtattttggtaagttatttggggagggggcggcgtaggaagtatagttcgtagtagtttttttgaaatcgggggtttttttttcgtttatttattgggtaatttatttcgtagaggcgtttttttttggttttagtttttagggggttaaatatatatagtataggattttaaattttaattaaaaaataattagttataggtttcgttaaaaggtgttttttaaataatcgggtatgatatttaatagtttaatttgggatatttgttgatatgttggtgtggaaaaggcgagaaagaggtttttaaaaagtagatgtaaataaatatttggttggtgttggattagggaaaaggttgatgttattgatgtttatttttttattatttgttgtgtgattataagagggaaaataaatatttttttatttagaattgttaaaatgtttgtttatttttttttgtagttttttaatttgtggagttataggatatttgttttatatgtttggggttaaaataataggatttattttgttaaatttgtgttgttatgtattttgaaatgtttagtgattaaaagcgtttttggatttggtatagtttttgggaagtagtttttttgtatggagggtgaagttttaatttgtttagggttgaatattttggggaagtaatagatttgttttggtggagttgtagttaggtaggtagattggaattagatgggcgaggtttattatagttagatattttaatttatatataaaagataattttagtttaaagatttggaatggttagatgtgtagattattagaaaagtttttagatttgttttgagattttatattttttgagtgggaggagatggagtgaaagtttttttttgggaatgataaatcgtgtatagtttttagtatagtgattaaatttttgggttttaaagtaagttatattaggttaaatgttagttttttaattgattgtttatatgattttggttaagttatttaat

SEQ ID NO: 696 - DNA, 2500 bp, Artificial Sequence
  chemically treated genomic DNA (Homo sapiens)
gttgaatgatttggttaagattatgtaaatagttaattggagagttggtatttgatttagtataatttattttgaagtttaagagtttaattattgtgttaaaaattgtatacggtttattatttttaaagaagaatttttattttatttttttttatttaaaaaatataagattttaaagtaaatttagagatttttttgataatttgtatatttggttattttaagtttttaaattaaagttgttttttatgtatggattaagatgtttgattgtaataaatttcgtttatttgattttagtttatttgtttaattatagttttattaaagtaaatttattatttttttaaggtatttaattttgagtaggttaaaattttattttttatatagaagaattgttttttagagattatgttaaatttaggggcgtttttagttattggatattttaaaatatatgatagtatagatttagtaaaataagttttattgttttagttttaaatatataaaataaatattttgtaattttataaattgaaaaattgtaaaaaaaagtaggtaaatattttggtagttttgagtaaggaaatgtttgtttttttttttgtggttatataataaatggtgaagagataaatattagtaatattagttttttttttaatttagtattaattaaatatttatttatatttattttttgaaggtttttttttcgttttttttatattaatatgttagtaggtgttttagattaaattgttgaatattatattcgattgtttaaaaaatattttttgacgggatttgtggttggttattttttaattagggtttgaaattttatattgtgtgtatttagttttttaagaattagagttagagaaggacgtttttgcggagtgggttgtttagtgggtgggcgagaagggagttttcggttttagaggggttgttgcgaattgtattttttgcgtcgttttttttttaggtaatttattaggatatttattacgtcggtttagagtcgggagaacgtttcggatgtgttagtattcggtttgggtttcggtttcggtttcggcgcgggttcgggtttcggttcgggttcgggtttaggtttcggtttcgggttagttgttttcgcgttttttatggtcgtgtttcgcgcgcgggtcgtgcgttttagttttcgcggcgttttcgtttcgtattcgcgcgtagtttgttcggatgtcgggttttcgttcgcggcgttatcgagtcgcgttttcgcgttgtatgtttcggcggtttcggttatttcgcgggggtttttcgtaggcgttcgtatttcgggtttaggtggttacgggttgcgcgattgataattttagaaatttttttatttcgttcggcgtagtaatagggtagtaggaggtaaagttcgtattattgagttgtacggcggggaattcgttcggtttagaagtaattaaatttattgtaaaggcgtttttttttgtgacgggaattaattaattaaggtacgcgattcgttttttttagtaagttttggtaggattcggtaggggtggtcgcggagtttttagattttggagggagtttttcgggatttttttttttaaaatgagtttttttagttttatatgattttttttttcgaggttaaagaaagcgtttagtaataaaaggtgttttgatgttaggttttttgtatggaaatgagtttcggataggagaataaatcgtttgttgaaagagtagtcgcgtcgcggttttcggttcgtataagtttttaattacgttatttacggaaacgtttttggtaacggaaattcgagaaagttaatttttaagcgattttcgtttaaaggttttataagtagttcgtgtcgttataatgtatatttcgtttttcgtgaagttaagcgatttaaggaattataaattttgtttttgttagttaagatttttttgtaaaataagtgtgaaagtttgggtacgagttattgtttggattattttttatgagtgggggtattttggtttttgaatgtttataatgttatgtattgttagggttttcggttaattaagggaaatgcgttttgggttttaattatttttttatattagggatatagggaagggttattttcgaaattaaatttaaatgattgtgtagttagttagtttatatatatttggggttttgtgtgtgtttttttaaggggaagttttaggatagatttattttataagggaattagttttggagaggtgattttttttttttgtgattttattttttaagattatttagagttttttttggaaggtgataatgtacgttatattcgatttggtgattgattatttttgaaatagttaagaaattatatggagtttgtttttttgttagggttttgtggtttaaaaggaaaaaaaaaagtgagatgttttagggagagagttttgtttgttttga

SEQ ID NO: 697 - DNA, 2487 bp, Artificial Sequence
  chemically treated genomic DNA (Homo sapiens)
tgtgtttgttttttttagagaaattggaggggtagtagttagtattttttcgttggttttattaagtatagttaaggtttttaggatatggttattttttatttgtggaagcggttttgttggggtgggtgggtgttagttggttttggtttgggttagagatatttagtggtttaggtgggcgtggggttagggcgtagacgagaaggggtacgagggtttcgtttcgaggatttagcggtaagtatcggtttcgggcgcgttttagtttatttattcgcgtgtttacggcggtattattttttataaggatttgaacgattcgggggcggtttcgtttcgttattttttgttttcggtttcgttttttttttggagggtcgatgaggtaatgcggttttgttattggtttgagggggcgggttttaatagttcgaggcggggttttcgggggtttagcgttatattattcggtcgtttaggtagcggcgtagagcgggtagtaggtaggcggcgggcgtttagacggtttttttttttttttttgtttttttagtttttgttttttcgtcgggaggtcgttcgtcgagttttgcgttagcgtcgaggtagtttcgttgcgttttatttcgtttcgtcgggtattcggagggtagcgcgtcggaggttaaggttgtttcgtacggttcggcgggcgagcgagttcgggttgtagtagtttcgtcggcggcgcgtacggtaattttggagaggcgagtagtagtttcggtagcggcggtagtagcggtaatgattttttggttcgggtttatcgtgtttttgggtagttggagtttgggggattggggcgtcgaggcgtgtatatgttcgtttagttatttttaggacgttttttgtaatttcgatatcggtaagcgtttttggtgtttcgttcgagttttacgttgtagttaggattgtagcgttgtttagggaggtagggcgagttttattttttttttttgttttaggagaggggtagacggggttggggcggagtggagaaattcgatgtttttgggcgggggcgttggtatagttgagaggggaagatgttttgtagaggaaatttatagtggttgagggagtttttggtcgtttttgtttttttaatttaggtcgtgaggtttttatcggtttttttgatatttggaaaatgtttttatttattattaacggaggaagggttagaagagaagggtggggaaagggtttttaaaatttggaatgttaattaaagtgttgggaaattgaatagttaaaaaaaaaaaaaaaagttgttcgttatgtgtacggaaagttgtaggagaaatttggagtatttcgagtttgtattattttttgcgtttatgaaatttattttttttattgagatttaatttagttgtaggttttttaggtaagcgttaatcgagtttttgggattgttaagtttgggtggatttaagggggaaaatgaggagaaagttgtggtattgatttacgttttggaggtattgtgtttgagagtgttgatagttagtagaaggtgcgaggggttatttattatatagttgtgaaaatttataggaaggttattttttttttttttgaatgtgtgtggggagggggagaatgggtagtggaaaatagatttgttattaaaagaataaatttgttaagggttatattacggtgatagttttagattggatttagtgttttgagtagagagattttgtaaagagattttttattttttagtgtgtatggagggtttcgagagtattttgggaggtttgtttgggagtgtttgggatatttgtgtttggatggttaaaggtggagtggtatttgggaaatatttttttttttttttttagtttataaagcgtgtaagtttagtggttttgttgggagagtgtgtgtgtgtgtattgggttgggttgggcggtggggtgggatagttttgtcgttttttgtttgtgtcgatttagaggtgaagaatggagcgtgtgtgttttaagtatagttataaaggagaaggaaattttttattgagttttgggtgagggattttattagcgtgttgtggtgaggagggggaggaggtaggagtttggtaggggaggtagtgagggtcgggaggggtattgttggtgggttgggttgagtttagaggttagagtgggggtgtggtgattagaatgttagtgtagttggtagttgagggtgtttgtgtgatttgaggttatttttgtaagaggttttttggggtttgtatggtatattttttttttttttgggggaatttagttggtttaggatttgtggattgtttagaaagatttttttgggtagtttgaagattggggagggttttttttttttttttatttttatttatattttatttattttttttttttttattttagttggtaatatttttatttgattagtgtgggg

SEQ ID NO: 698 - DNA, 2487 bp, Artificial Sequence
  chemically treated genomic DNA (Homo sapiens)
ttttatattaattaggtgggaatgttattaattgggatgaggagggaaagggtaagtggaatgtgggtggaggtggaggagggaggaaaattttttttagtttttaggttgtttaaaaggatttttttaagtaatttataaattttgggttagttgggtttttttaggagaggggaggatgtattatgtaggttttagggagttttttataagggtgattttaggttatataaatatttttagttgttaattgtattgatattttggttattatatttttattttgatttttaggtttagtttagtttattagtagtgtttttttcggtttttattgttttttttgttaagtttttattttttttttttttttattataatacgttggtagagttttttatttaagatttagtggaaaattttttttttttttatgattgtatttaaaatatatacgttttattttttatttttgaatcgatataggtagagggcggtaaggttgttttattttatcgtttagtttagtttagtgtatatatatatatttttttagtagagttattggatttgtacgttttatgggttggaaaggaggagagagatgttttttagatgttattttatttttagttatttaaatataagtgttttaaatatttttagataagttttttaggatgttttcggggttttttatatatattaaggagtaggaggtttttttatagggtttttttatttaagatattaagtttagtttggaattgttatcgtgatgtgatttttggtaggtttgtttttttggtgataaatttgttttttattatttattttttttttttttatatatatttaagggggaaaaaaatagtttttttgtgaatttttatagttatgtggtgagtgatttttcgtattttttgttggttattaatatttttaaatatagtgtttttagggcgtgggttaatgttatagttttttttttatttttttttttaaatttatttaaatttggtagttttagaagttcggttagcgtttgtttgggaagtttgtagttgggttgggttttagtgaaaagaatgaattttataggcgtaggagatgatgtagattcggagtattttaagttttttttgtaatttttcgtgtatatggcgggtaatttttttttttttttttaattatttaattttttagtattttagttagtattttaagttttgggaattttttttttattttttttttttagtttttttttcgttagtagtgaatggggatattttttagatgttaaaaggatcggtaggaattttacgatttaagttaggaaagtaaaggcggttaggggtttttttagttattgtgagttttttttgtagggtattttttttttttagttatgttagcgttttcgtttaaggatatcgagtttttttatttcgttttaatttcgtttgttttttttttggggtagaggaaaggagtggggttcgttttgtttttttaagtagcgttgtagttttggttgtagcgtggggttcgggcggggtattaggagcgtttatcgatgtcggagttgtagaaggcgttttgggggtggttgggcgagtatgtgtacgtttcggcgttttagttttttaggttttagttgtttaggagtacgatgagttcgagttaaggggttattgtcgttgttgtcgtcgttgtcggggttgttgttcgtttttttaaagttgtcgtgcgcgtcgtcggcggggttgttgtagttcgagttcgttcgttcgtcgggtcgtgcggggtaattttggttttcggcgcgttgtttttcgagtgttcggcgggacgggatggggcgtagcgaggttgtttcggcgttggcgtaggattcggcgggcggtttttcggcgaaggagtaggagttggaggagtaagaggaggaggagaagtcgtttgagcgttcgtcgtttgtttgttgttcgttttgcgtcgttgtttgggcggtcgagtgatatagcgttgggttttcggggatttcgtttcgggttgttggggttcgtttttttagattaatggtagagtcgtattattttatcggttttttaaaaagggggcggggtcgggggtaaggggtaacggggcggggtcgttttcggatcgtttagatttttatagggaataatgtcgtcgtgggtacgcgagtgggtgggttggggcgcgttcgggatcggtgtttgtcgttgggttttcggagcggagttttcgtgttttttttcgtttgcgttttggttttacgtttatttgggttattgggtgtttttgatttaaattagaattaattaatatttatttattttagtaggatcgtttttataggtgaggggtggttatgttttagagattttgattgtgtttggtggaattagcgggggaatgttaattgttatttttttagtttttttggagagagtaggtata

SEQ ID NO: 699 - DNA, 5000 bp, Artificial Sequence
  chemically treated genomic DNA (Homo sapiens)
tgtttagaaggtaatatgcgttttttcgcgtgttaggtggagtgtattttaataagatattagggttttaatatatggttggagtggcgattaaaagggaaaatttagtttttagtttaagttttttagagatatttttgttaattttcgtatttttttacgttttattttacgtgtgagagtttgtaaaattatcggggattggattcgatggcgagttttacgttcgggaatagttagtaatcggaaggggaagtggataggggaattttaagaggcgagtttgttacgcgggaagcgttcgaatttgcgggtttttatgaatgtagagggcgtcgggaagggggggtattcggtcgcgattttttttgttttttttattcgttgttttttttttcgttggaatttttttgtaaagtaagacggagtagggggagggggagagggaaggggcgagagggttttcggtttattttcgagacgtgaggattcgttatttaggtatttttttcggggtgggttgggtttcgggacgattattcgtttttttttcgttttcgttgtttttatttcgggagatttagagttttggatgttttttttcggagaagggggggtgtgcggagtcggggtggaagagattttgttcgtagagttatattaagtgatgtttagaggttgggagtttcggcggtttttgttttttgtttgtcgggttagatttatattttaaaaatatttttcgttttttttttttttttcgttttttttcgttgtaattttttttgattcgtttaaaggtggtttaggtgaaattggagtaatttttttatgggggttttaaaatgtaagtgaatgtttttattcggggtgatttaaaagtttaagtcgggaagtttaacgtgattaaaattaataggtgattgttcggggtcgattgtgtgcgggtgtatacggtattcggttcgggtgttattcgcggcgttggattgttttattttgagtttgtaatttgggttttttagcgagttttttttttttttgaaagttaatggtttttatagtaattagatatttttttcgttcgtttttttttttttttttttttatatataggagatgggatatttattttcgttgttattgataaggtcggaggcggtcgggtttttttttagttttcgttcgttttagcgttcgtttttttttcgtttttttttggtttttttttgatgtagtggggaacgcgttttattaaaaaaaaaaaaaaaaaaaaaaaaaaaaagtaatttgttcggtaataattagcgcgtagtagtaggagttttagagttattggttatgtaaatagagggaggggagacggcgttttaaatttttttttatttttttaaagcgatattttttttttttttttttattatttttttcgttttattttcgtttaaagaggttggtttcggggtttgagttaatcgtttgtatttttagtttattcgtttttttttttcgttttgtagggaatttagtgtacggtttatttagttcgcgttttatttcgttttgttggtttttcgcgtttttgttcgggttttttttttcggtgagggaggtatttagtcggtttcggtgtgtttagagagttcgagttacgttatgttcgttgtacgtgttagtttggttagtatattagggcgttggtttttttttttttttttggagtgaaatatattaaagggcgcggtgggggtggggggtgacgggaggaaggaggtgaagaaacgttattagatcgtattttttgtaaagatagttttgatttaagtatgcgttagagtacgtgttagggtcgatcgtgttggcggcgattttatcgtagtcggtttttagggagaaagtttggcgagtgaggcgcgaaatcggaggggtcggcgaggatgcgggcgaaggatcgagcgtggaggttttatgttttcggggaaaggaaggggtggtggtgtttgcgtagggggagcgagggggagtcggatttaattttttattcgttttttttttttttcgggttattttttagaaagttgtatcggtgtggttacgtttagcgtagatatttcgggcggtttgttagtagatgtaggggcgaggaagcgggttttttttgcgtggtcgttggtcgcgggggaatcgttgggagttttgttttcggtttgcggcggttttagacgttgtatcgcgtcgttttacggcgttcgaagagtttttagaaatacgatggtttttgttcgaggattatattttatttttttagagaagtatttttttttttttttaatatttattttttttttttttttttttttttgtatatattttgtaggggggggtagaagggacgttgttttggtttttttaatcggggttttcgaaatagtttcgaagttattaggaatatagattttagggatatgatttttatttttgggtatgcgaggttgttattttttaaaattatttttttttttattttttatttaagggatttatttttaaattgtttgaggttattttatttttagataatttattttatatttttggattttaaatataagggtaggaggattaggattcgttttgaagaagttaaagttggagggtcgtattttggcgtgttatatttatagaatgagtgaaattagagggtagaaataggagtcggtagttttttgtgggttgttttgttcggggtttttggtatgtagggttggatggagggagaggggtggggggtggcgggggatcgcgtttgaagttgggtcgggttagttgttgttttttttaataacgagaggggaaaaggagggagggagggagagattgaaaggaggaggggaggatcgggaggggaggaaaggggaggaggaattagagcggggagcgcggggagagggaggagagttaattgtttagttagtttgcgttatcgttttagagcggagaagagcgagtaggggagagcgagattagttttaaggggaggatcggtgcgagtgaggtagtttcgaggttttgttcgtttattatttaattttcgttttttttttgttttattttttttttttgtttttatttttttttcgaaaattttttatttagttaaaggaaggaggttaggggaacgtttttttttttttttttaaaaaataaaaatagaaaaatttttttttaggtcggggaaagtaggagggagaggggtcgtcgggttggttatggagttgttgtgttacgaggtggattcggttcgtagggtcgtgcgggatcgtaatttgtttcgagacgatcgcgttttgtagaatttgtttattatcgaggagcgttatttttcgtagtgtttttattttaagtgcgtgtagaaggatatttaattttatatgcgtagaatggtggttatttggatgttggaggtaggtcggggggtggcgttcgttaggagttaggattttttcggatgttcgggttttcggtcggagttttaaatttgggagagggtaattttcgcgtcggtttttcggtttttgtgcgggagtttatcgcgcgttttttggcgagacgcgtggttttatttttgtttttttttagataaattggggaggtagaggggggaggaaaatttgggagaagcgaggttgttttgggcgggggtaggggagtatttcgcgcgcgtgtttttgtatgtggttgttttttttttttatttttttcgcgatttgttttttgcgaagtcgtcgcggttgtttgcgttgcggttaggaagagagtcggggtttgaaatcgggatttcgagtagaaaggtaattttttttaaaaggttagagtaaattcgttttggttttaggttttcgtttgtggtcgcgatttcgcgttggtattttatcggggaggtggagggaggagggagaaggagagaaacggggaattcgggagtttcggaagttttattgaagaaacgcgtgttttaggggaatttaaaagaatcgttttttgttttttattttaagtttttgtttagcgagtcgtgtgtttacgtatgtatagttttggatttgtcgtggtttcgttatgttgttttgtaaattttttttggaaaggttgggaaacgtcgttcgtttattttcgtattttattatttcggttattttatttttaatcgtgtttttttttttattttttattttacgaagattatttatagtttggttttttagttttttcggtgcggagatttgggtggggtaggaagggggggagggggtgtgtgtaggggggatatcgggttatttttgaaggagaggtgggagtttttcgtgtttttttttagggttttttgttttcgttttttttttcgttcgttatcgcgttttttagtttttgtttttgtgggtcgtagtcggatattttcgtcgcggcgtttatttttttaagttttttttcgggatttaaagttttaggggtcggaatatagatttttttggtattcgaaatttttgtttcgggaagtttggtttttttttggggtttttacgttaaaagggtttttttaggatattttttcgatttttaattattttttgaaattatttttttttgtttcgattttagttgtcgaggttgcggcgtttttttttttttttttttttttttttttttttttatttttttttattcgtttttttaaaagcggtttttgggtcgtagggatttttttagatattttttttaattgtcgggaatgatagaggaggatttggggattcggatgagattaagaagtggattttcggagtttttagaatatttttattgattttttgaaaagatgacgaaatttaaaaaagagtgagtgagttagagtgcgcgaaggagtagttaaagggagcgtcgcggagttgtcgcggttgttgcgtattttttcgatttttcgttttggagttgtagtttat

SEQ ID NO: 700 - DNA, 5000 bp, Artificial Sequence
  chemically treated genomic DNA (Homo sapiens)
gtgaattatagttttaaaacggggagtcggagaagtgcgtagtagtcgcggtagtttcgcgacgttttttttggttattttttcgcgtattttaatttatttatttttttttggatttcgttatttttttaaaaaattaataaaaatattttggaggtttcgggggtttattttttggttttattcggatttttagatttttttttattattttcgataattggaaaaaatgtttgggggggtttttgcggtttaggggtcgtttttgggggggcgggtgaggagaggtggggaagagagggggagggaggagaggaggaagagcgtcgtagtttcggtagttggagtcggagtagggggggatggttttaaaaaataattaaaaatcgaggaaatattttagaaaagtttttttggcgtgaaaattttaaagaagagttaggtttttcgaaatagaggtttcgggtgttagaaaggtttgtatttcgatttttggggttttggatttcgggaggaaatttgaaggggtgagcgtcgcggcgggagtgttcggttgcggtttataaggatagaaattagggaacgcggtgacgagcgaggggaaagacgggagtagagagttttggaaagaggtacggggggtttttattttttttttaggggtgattcggtattttttttatatatattttttttttttttttttattttatttaaattttcgtatcgaggaagttggaaaattaaattgtaagtaattttcgtgaggtggggggtgggggagagggtacgattagaagtggggtggtcgggataatggggtgcgagggtaagcgggcgacgttttttagtttttttaaagggagtttgtaaagtaatatggcgaaattacggtaggtttagagttgtgtatacgtgggtatacggttcgttgggtaaagatttggagtgaggggtaagaagcggtttttttgggtttttttgaaatacgcgtttttttaatgggattttcggggttttcgaatttttcgttttttttttttttttttttttttttattttttcggtgaagtgttagcgcggagtcgcgattataggcggggatttgaggttaagacgaatttgttttggttttttggggggggttgtttttttattcggggtttcgattttaggtttcgattttttttttggtcgtagcgtaagtagtcgcggcggtttcgtaaaagataggtcgcgaggggggtgggaagaagaggtagttatatgtaggaatacgcgcgcgggatgtttttttattttcgtttaggatagtttcgttttttttagattttttttttttttttgtttttttagtttatttggagaggaatagaaataaagttacgcgtttcgttagaaggcgcgcggtaaattttcgtataggagtcgggaggtcggcgcggggattgtttttttttaggtttagggtttcggtcggggattcgagtattcggaggggttttggtttttggcgagcgttatttttcgatttatttttagtatttaggtggttattattttgcgtatgtagggttggatgtttttttgtacgtatttgaagtaggagtattgcggaaggtagcgtttttcgatggtgagtaggttttgtaggacgcggtcgtttcggagtaggttgcggtttcgtacggttttgcggatcgggtttatttcgtggtatagtagttttatggttagttcggcggttttttttttttttgtttttttcggtttggaaaaaggtttttttgtttttgttttttggaaggggaggggagagcgtttttttgattttttttttttggttaaatagggggttttcgggggagaggtgagggtagagagagaaggtggagtagaagggaggcgaggattgggtggtgggcgagtagagtttcggggttgttttattcgtatcggttttttttttaaaattggtttcgtttttttttgttcgttttttttcgttttgaagcggtgacgtaagttggttgggtagttagttttttttttttttttcgcgtttttcgttttggtttttttttttttttttttttttttcggttttttttttttttttttaattttttttttttttttttttttttttttttcgttattaaggagaatagtagttggttcgatttaattttaaacgcggtttttcgttattttttatttttttttttttatttagttttgtatgttaggggtttcggatagggtaatttataaaaaattatcgatttttatttttgttttttaattttatttattttgtaggtgtagtacgttaaaatacgattttttaattttggtttttttaaaacggattttaatttttttgtttttgtatttaagatttaggaatgtagggtagattatttgaagatggggtgattttagataatttagaaataggttttttaagtgaaaaataagggagggggtgattttagaaaatagtaatttcgtatatttagagataaaggttatgtttttgaagtttgtgtttttgataatttcgaagttgtttcgaaagtttcgattaaagggattagaataacgttttttttgtttttttttgtagagtgtgtgtagaggaagaagagggagggagaggtgggtattaggaaggaaggggggtgtttttttggagggatagaatgtgattttcgagtagaaattatcgtgtttttgggggtttttcgggcgtcgtggggcgacgcggtgtagcgtttagggtcgtcgtaggtcgggggtagggtttttagcggttttttcgcggttagcggttacgtaggaaaaattcgttttttcgtttttgtatttgttgataagtcgttcgaggtgtttgcgttgagcgtggttatatcgatgtagttttttaggaaatggttcgggagggggagggggcgagtgagggattaggttcggttttttttcgttttttttgcgtaaatattattattttttttttttttcggaggtatgaggtttttacgttcggtttttcgttcgtattttcgtcgattttttcggtttcgcgttttattcgttaggttttttttttgggagtcgattgcggtgaagtcgtcgttagtacggtcggttttgatacgtgttttaacgtatgtttgagttaaggttgtttttataggagatacgatttggtggcgtttttttattttttttttttcgttattttttatttttatcgcgttttttggtgtattttattttaggaggaaggggagagattagcgttttgatgtgttggttaagttggtacgtgtagcgggtatggcgtggttcgagttttttgggtatatcgaggtcgattgagtgttttttttatcgagagagggggttcgggtaggggcgcggagagttagtaaggcggggtggggcgcgggttgggtgagtcgtatattaggttttttgtaaggcggaggaggggagcgaataaattagaggtgtaagcgattaatttaggtttcggagttagtttttttaaacgagggtggggcggaaggggtggtgggggggaaaggaggggatatcgttttaaaagggtgaggaagagtttggggcgtcgttttttttttttttatttgtatagttaatagttttggggtttttgttattgcgcgttgattgttatcgggtagattattttttttttttttttttttttttttttttagtaggacgcgttttttattatattaaaaggaagttaagggagggcggagggagagcgggcgttggggcgggcgaaagttggggagaggttcggtcgttttcgattttattaatagtagcgggaatgagtattttattttttatatgtaaagaaaggggagggaaggggcgggcgaggaaaatgtttaattgttgtggaagttattagtttttaggaagaaaaaaagttcgttgaaaaatttaagttgtaaatttaaaatgaaatagtttagcgtcgcggatgatattcgggtcgaatatcgtgtatattcgtatatagtcggtttcgaataattatttattggttttagttacgttgggtttttcgatttaagtttttgagttatttcggataaggatatttatttatattttaagatttttataagggaattattttaattttatttaagttatttttgagcggattaaagaaagttgtagcggggagaggcgagagaaggagggagggcgggaggtatttttaaagtataaatttaattcgataggtaagggatagaggtcgtcggggtttttagtttttggatattatttgatatagttttgcgagtaaggttttttttatttcgatttcgtatattttttttttttcggggaaaggtatttagagttttgggtttttcgaagtgggggtagcgggggcgaggaagaagcgggtggtcgtttcggggtttagtttatttcgaggagaatgtttgggtggcgagtttttacgtttcgggagtgagtcgagggttttttcgttttttttttttttttttttttttatttcgttttgttttatagagaaattttagcggggaggggggtagcgaatgggaggggtagagagggtcgcggtcggatgtttttttttttcggcgttttttgtatttatggagattcgtaagttcgggcgtttttcgcgtggtaggttcgttttttgaagtttttttgtttattttttttttcgattattgattgttttcgagcgtgaagttcgttatcgaatttaattttcggtggttttgtagatttttatacgtggggtggggcgtgagagggtgcggaggttggtaggaatgtttttaggaggtttggattggaaattgagtttttttttttggtcgttattttagttatgtgttaaaattttaatgttttgttaaaatgtattttatttagtacgcgggaaaacgtatgttgttttttaggta

SEQ ID NO: 701 - DNA, 5001 bp, Artificial Sequence
  chemically treated genomic DNA (Homo sapiens)
ttaggaagtttatttatgggaaatttatatttatggtgttttgatgttgtagaggatattttgagttggttggagtaatttgggatataggttaatcgattgtaatttaatttttgaggttatttagtattttttatagtggttatttaaaaaaaaggtagttaggtgtggtggtttaagtttatatagattttagaattttggaaggttgaggtgggaggattatttgagttaaggagtttgaggttagtttgggtaatatgaagaaattttgtttttataaaaaataaaaaaaattagttaggtatggtggtatgtatttgtagttttagttttttgggaggttgaggtggaagaatgatatgagtttagtaagtcgttgtaattagtcgtgattacgtcgttgtattttagtttgggcgataaaaagaaaaagaaaacggagtttgtttattgggtgtggtagataaggtaaatttttttttattttttatattttataattttggatgtgtttatagttatggtagtgttttgtaatgatgtagttgatgataggtgtgatgttggagatttttttatttgattgttgttattagttttattagtttttaacgtttggtgtttgttttaaagggtatgttttaggagtcgttttaaatttttaaagtattattttttatataaataagaagtgtaagtaagtagtttgagtttagttttttaataggaatattttattattattagattaagtttttttattataatgattgatttgtttttgaattttgtggatttattttttaaaatgttttttttttttagtttttatagttagtgttttaaaagtgatttgtagtattttttgttgagacgaatgtattagttttttaattagtttgtattttttttatttttttaagttagtgttagattattttgtttgaaaaattatttttagtgtgttttattttagtagaaatgttttttagtttttaattaataattatattaaatttttgtttttgtttgcgttttaagggtatttataggtcgggcgtcgtggtttttatttgtaattttagtattttggaaggtcgaggcgggtagattatttgaggttaggcgttcgagattattttgattaatatagtgaaatttcgtttttattaaaaatataaaaaaaaaaaaaatagtggggcgtggaggtgtacgtttgtaattttagttattcgggaggttgaggtaggagaatcgtttgaattcgggaggtagaggttttagtgagtcgatatcgcgatatagtattttagtttgagcgatagagcgaggttgtgttttaaaaataaataaataataaattaaaaaaataagagtatttataatttggttttagtttgaatttttttttttattttaatacgtagttttagttatatttttttgacgtttgtaaataagtttagttttttttgttgtgaagttaagtttaggtggttttttttcgtttgattgtttttttattttatttatcggaagtttagttatttttcggagggttgtacgggggttgtaagaagtaacggaaacggtttagtatttgttattttttattatattttttttaataaaggggtaattttcgttaatggtagtgtagattttttaatttttatatatggaagatttatattatttaggattgttgtttaattgttgagagagtatttgatatttaatagtttattaggttataagatagcgtaggaaagaattttttgttgtttttttatgttattttgaatagttggtttatagagttattgtaaatatataaaatatgattgttagggtttagtagtgaggaaggtgggaattagttttgatttagttaattgtgtttaggagaagttgtttaattttaaaggattttattattattagaattaataatattaattttaggggtaaaaataaagataaatgtgtgtaaattttgtttgtagtttcgggtacgtcgtgggtgtttaagaattgtttttaggtagtcggtggggataaagtttgtgtgttttttgttttggaataggttttaaggtcggtttatttgtaaagtaagggtacggcgtaagagtattgaatacgggttggaagggcgttggttttatttttagtttataggtcggttgggcggcgttgattagtagttaggtttcgttttttttaggaacggttacgggggttttgggagggtatgaatgtttttttgtagtgaggtttttggatttcgcggtttttcggtagcgtaattaaaatttaggggtaggcgtcgtagtcgtttagtgtagttagattttcgtcggtatttttaggggcggagtcggaggtagggttttcgggtcgtattaattttacgggggtaggggtcgttttttttcggtcgcgcgttatttaagtacggtagataggtagcgaggttgtcgaggtcgaggttagtttgtagttttttttttttcgtgttttgggcgcggggtgtacggtaagcgcgggcgggcgggataggtacgtagggtattttcggggttgggcgcggcgggcgcggggcggggttcgcggggggggggggcggggcggcggtgtttttgcggcgtagttggggtcgcggttttgtttttcgcgtttttttaaggttcgcgggcggcgtaggagcggtattcgtggttgtggtggtttcggtagcggttttagtagatcggcggtattagcggtagtattagtattagtagtatgttgagtcgggtagtgtgcgggtgagaagaaaggggattcggttacggttttaagggcgaaggggttcgcggcgggtagggttttcgcggtaatggcgatagtggtcgtatcgggtttggcgggatcggggtatttgtaggcggttttttcgggagtgttcggcgcggcggttggagcggggattcgtagggaggggacgcggggattcgggggacgtcgcgcgttgtcgtttttcggtagtttagtttgcgtagacggtttcgcggcgttgattgatcgggttgtgttttttcgtttttagtattagtaggtagttggtttcggttttggggtatttgggttttaggtagaagtatagttttttcgatttgttttacgattacggcgttttggaattttatattaacgcgtagattatgtagttgtattatagtaagtattacgcggtttacgtgaataatttgaacgttatcgaggagaagtattaggaggcgttggttaagggtaggttttaggttgagcggcgggaggtagttttcggtagaggcgattttagggagttaggttttatacggacgggttttttcgtggaggagaattcgtttcgtatttgtatcggtttcgagttttttaggtacgatagttttttttttaaatatatggtttattttattgtagaaggagtgtttcgatgggtttgaatatatttttgttattttagggaatttggggttttgcgaaggagtttgttttattgttgtgagttatatttcgttatatatattgttagtattggtgaattgtagggtttgaaaagaaagttttattgtgttattcgttttttttgtaaattgaaattgtttttgttgtataatgtgttttggggaaatgtttggttttttaggtaggtgtgttagtcgtttgtaggagggttgagagcgtttgtttattggtggttagatattatcgggttcgtaggtgtttttgagtgttagggttattttttgatagaagtgggagtggtgttttattgttaggttatattgaaggtgggagataggaggatattatttcgtgttaggaattatggtttttgttatttttttgagagtaaacggggtcgggattttagtttaggatttggagattttttgtatttttagttattttgtaggtgaaattttattgagtttatttgattttaggtgggagaggaggaggtatatcgttgtggtgtgcgttattaaaaaagtagtaatttaattgtggaatagtttaggatttttagatttgatattttttttgattttttttaggggttaaagtttataaggaaaatagttttttagtgggaaattgaaataggtttgtttttatttattatttatttatatttgtaatgtaattaaaatatatgttgttaatttttttttttttttttaagagttcggttgataaaattaggggtatgtggattttttgagtttgtgttttttgggggtgtgtatgggaatgttatgttttaacgttttttataaaatagtattgtttttttaatttattcgttagtggtttgtataaggaagataatcgatagttatgttttttagattttttgtattgtttggtaagttacgtagtaaaaaatgtttatttttttttaaatgttttgaatttcggggttatgaaatttgttgagtaatttttagatagttatattttgttgattggaggtatttagtggaaaaatgtagtattttagtttgattgtgtttgaagtaaatgattaaaagaggaggaagttattatattttggaagatttatttgagatagacgaattttgaattacgggaaaaggtttcgtgatttaggaaataataaatttgggaaatatgtaatggggagagattggggaatattttagttgtgaaagtattttttgtaaggtaatatttgatattaggaatttttttttttagtattttaaaaataatttaattttagttttttatttgtggaattagagttttatttatgtaatataatttattggaaaaaagttttttattgtattgtattatattgtttataagtgattgagtatttgtagagtttttttttatttaaatatattttaaaaattattaaaaagatttttatgtttgaaaatttggggaaaaaagataaaataatgttataattttatt

SEQ ID NO: 702 - DNA, 5001 bp, Artificial Sequence
  chemically treated genomic DNA (Homo sapiens)
gatgagattatgatattgttttattttttttttttaagtttttaaatatgaaaatttttttaataatttttaaaatatgtttaagtaaaagaaagttttgtaggtatttaattatttataaataatatagtataatataataaaaagtttttttttagtgggttgtattatataagtaaggttttgattttataagtaaaggattgaaattaagttgtttttaaaatattgaagagaaaggtttttggtgttagatgttgttttataggaagtatttttataattggggtattttttagtttttttttattatatgttttttaaatttgttattttttaaattacggggttttttttcgtaatttaaggttcgtttgttttaagtaaattttttagaatgtggtaattttttttttttttaattatttattttaaatataattaggttgaaatattgtatttttttattagatgtttttagttaataagatgtgattgtttaaaaattatttaataaattttataatttcgaaatttaaaatatttaaggaaaagtaaatattttttattacgtagtttattaagtaatatagagagtttaaaaaatatgattatcgattattttttttgtgtaaattattaacgaataaattaaaaagataatattattttgtaaaaaacgttaaaatataatatttttatatatatttttaaaaggtatagatttaaaaagtttatatatttttggttttattaatcgagtttttgagaaaaaaaaaaaaagttaataatatatattttaattgtattataaatatgagtaaatagtaaataaaaataagtttgttttagttttttattaaagggttattttttttgtgaattttgatttttaagggaaattaagaaaagtattaagtttaaagattttgaattgttttatagttaggttattgtttttttggtaacgtatattataacggtgtgttttttttttttttatttgaagttaagtgggtttagtgaagttttatttgtagggtagttggggatgtagggagtttttaagttttaggttggagtttcgatttcgtttgtttttaggaagatgataaggattatggtttttagtacggagtagtgtttttttgttttttatttttagtgtgatttggtagtaagatattatttttatttttattaggaggtgattttgatatttagagatatttgcggattcgatgatgtttggttattagtggataggcgtttttagtttttttgtaaacggttggtatatttatttgagagattaaatatttttttaaagtatattatataataagaataattttaatttgtaaaaaaaacgagtgatatagtagagttttttttttaggttttataatttattagtgttggtaatatgtgtaacggaatgtggtttataatagtaaggtaagttttttcgtaggattttaagttttttgagatgatagaagtgtgtttaaatttatcgaggtattttttttataatgaggtagattatgtgtttaaaagagagattatcgtgtttggaaaattcggaatcggtataaatacgaagcgagtttttttttacggagaggttcgttcgtatggggtttggttttttggggtcgtttttgtcggggattgtttttcgtcgtttagtttggaatttatttttggttaacgttttttggtattttttttcggtgacgtttaggttgtttacgtaggtcgcgtggtgtttgttgtggtgtagttgtatgatttgcgcgttgatgtgaggttttagggcgtcgtagtcgtagggtaggtcggggaggttgtgtttttgtttggagtttagatattttaaaatcggagttagttgtttgttggtgttgaagacgagaaagtatagttcggttagttagcgtcgcgggatcgtttacgtaggttgggttgtcgaggaacggtagcgcgcggcgtttttcgagttttcgcgttttttttttgcggattttcgttttagtcgtcgcgtcgggtattttcgggagaatcgtttgtaggtgtttcggtttcgttaggttcggtgcggttattgtcgttattgtcgcggaggttttgttcgtcgcgagttttttcgtttttggggtcgtgatcgggttttttttttttttattcgtatattgttcggtttaatatgttgttagtgttggtgttatcgttgatgtcgtcgatttgttgaagtcgttgtcgaagttattatagttacgagtgtcgtttttgcgtcgttcgcgggttttaagaaagcgcggggagtagggtcgcgattttagttgcgtcgtaagggtatcgtcgtttcgtttttttttttcgcgggtttcgtttcgcgttcgtcgcgtttaatttcgggggtgttttgcgtgtttgtttcgttcgttcgcgtttgtcgtatatttcgcgtttagggtacgggagaaaggaggttgtaggttagtttcggtttcggtaatttcgttgtttgtttgtcgtatttgagtggcgcgcggtcgaagggaggcggtttttgttttcgtggagttggtacggttcgaaggttttgttttcggtttcgtttttgagggtgtcggcggggatttggttgtattaggcggttgcggcgtttgtttttgagttttggttgcgttgtcggggggtcgcggggtttagaggttttattgtaaaaagatatttatatttttttagggttttcgtggtcgtttttagggaagacggggtttagttgttggttagcgtcgtttagtcggtttatgagttgagggtagagttagcgtttttttaattcgtatttagtatttttgcgtcgtatttttgttttgtaagtaagtcgattttgggatttattttaggataggaggtatatagattttgtttttatcggttgtttaagaatagtttttggatatttacgacgtgttcgagattgtaggtaggatttgtatatatttatttttatttttatttttagggttggtattattgattttagtaatagtgaaattttttgaggttaagtagttttttttgggtatagttaattgagttaggattagtttttattttttttattattaagttttggtagttatgttttgtgtgtttatagtaattttgtgaattaattgtttaggataatataaaaggataatagaggatttttttttgcgttgttttgtagtttagtaagttgttaagtattaagtgtttttttaatagttaaataataattttgaatggtgtgaattttttatgtgtagaggttaggaaatttatattgttattggcgggagttgtttttttattgaaaagaatatgatggaaggtagtaggtgttgaatcgttttcgttgttttttgtaattttcgtatagtttttcgaaggatgattaggttttcggtaagtggaatgggaaaatagttaggcgaagaggaattatttgaatttggttttataataggaagggttgggtttgtttatagacgttagaagaatgtaattagggttacgtgttggggtgaaaaaggaaatttaggttgggattaggttatagatatttttatttttttaatttattatttatttatttttgagatatagtttcgttttgtcgtttaggttggagtattgtgtcgcgatgtcggtttattggaatttttgtttttcgggtttaagcgatttttttgttttagtttttcgagtagttggaattataggcgtgtatttttacgttttattattttttttttttttgtatttttggtagagacggggttttattatgttggttaggatggtttcgaacgtttgattttaagtgatttgttcgtttcggttttttaaagtgttgggattataggtaggagttacggcgttcggtttatagatatttttaaaacgtagataagagtaggggtttgatgtgattgttaattggaagttgagaaatatttttgttgaggtgagatatattgaaagtggttttttaggtaaggtggtttggtattgatttggggggatgaagggagtgtaggttagttaggaagttggtatattcgttttagtaggaggtattgtaggttatttttagggtattagttatgagaattggaagaaaagggtattttgaaggatgaatttataggatttagagatagattagttattgtaatggaaagatttgatttagtgataatgaaatatttttattgggaggttgagtttaggttatttatttgtattttttgtttgtatagagagtgatattttgagagtttaaagcgatttttaggatatgttttttagaataagtattaaacgttgggggttggtaggattgatagtagtagttaggtagaagaatttttaatattatatttgttattagttatattattataaaatattattatgattgtgagtatatttaaggttgtgggatatgggaggtaaagaaaagtttattttgtttattatatttagtgaataggtttcgttttttttttttttttgtcgtttaggttggagtgtagcggcgtgattacggttgattgtagcgatttgttgggtttatgttatttttttattttagttttttaagaagttggaattataggtgtatattattatgtttggttaattttttttattttttgtagaaatagagtttttttatgttgtttaggttggttttaaattttttggtttaagtgatttttttattttagttttttaaagttttgggatttatataggtttgagttattatatttggttgttttttttttaggtggttattgtagagggtattgaatggttttagaagttagattatagtcgattgatttgtgttttaagttattttagttagtttaggatgttttttgtaatattaggatattatgaatatggattttttatagataaattttttaa

SEQ ID NO: 703 - DNA, 2001 bp, Artificial Sequence
  chemically treated genomic DNA (Homo sapiens)
ggtcggattagcggaggttttaagaagagttagagcgttttgtattttcgatacgcgttataagtggtttaggagcggagggaggagcgttgcggtacgggtcgggtcggtcgggtcgggtaaagaaggtcgagacgtgtttttggaagattcgtttttcggtttcggtgttattcgttttttattttttttttttttttaattagagtaatgacgtttaaattcgtatttatgcgcgtaggtaatcgggtgggtggacgcgcggttattaaatttatagtatcgttattaattttgggagggtacggtcgggattaggaggagggggagcgtttatatttggggaggtaggtgcggaggcggtcggttcggggatttcgagtgcgtaggattcggggtcggggtcggggtcggtaagtcgggcgttgtgagcgcgtcggagcgttggttcggagtttggtagggggcgtttgtatcggttgggtagttcggggcggtggcgatggttggcggcggcggcggggtgtgcgttaggaggttattttttcgttgcgtttttggcggagtcgggtttgtttgtttttggtcgtcgtcgttatcgtcgcgtaagtcggatagtcgtgagggttggaggggaaattaggttatcggttcgtagacgcggcgcggagtaggcgtttcgggttcggagtaagatagcgttcgggaagcgggtcggggcgggtcgggtacgcgggggattcggagaggcggggattttggtgttttagtcgtagtagttttttacgtttataaaagtggagagatcggggaggtgcggcgcggttttggttgcggtcgttttttttcgtttaaggagttgatattttgtaggattcgcgcgacgtttagtcgtcggcgtttttcgggatttcgtcgtcgggaggagggggcggaggagggtggagattgcggggtttggttaaggaaggcgtatattttcgggcgggcggtcgtgacgcggcggggattaattttgtatgaataatgtgagtgcgtttggaaaagagattttttgtttcgcgggttcggggtaagagttcgtaggttatttttttcgggtaggggcgtttaatttaatcggttttagggtattggtaatttggttagaggatcgcgcggaggtagcggggtgagaggaggagggggcgatagttttaattgtttatagggtgggcgggatggtgacggagcgtcgtaagaattcggaggggtgcgggcggttaagtcgagcgcgcgcgggcgggtaggcgggtgagcgtgggtggtgggggtgttattagtttgattatttgttttcgcggggtttttgcgtttcggatttgggaggaggtgttttttcgtgttcgggtatcgcgcggcggtaggttgggagttacggagtggatagtggtggaatagggtggtcgggttttgttttaatcgtagcggttttgttttttaaattttaagtttagttgttgatatgttttttgtgaaatggagtttggtatttttagcgtcgaatttagtggaagtttttatgatgaggaagttgtgtgatatgggggttcggaaaaggttggtaggttaggggggagggttaaagggattgtgggttttttattttttttttttcgtttgtttcggaattttcgggtttggaaaggagaattattttggatgttggcgtgcgtcgtggtcggtgtttggcgattgggttttttttcgttttttgggggtttggcggggatttcgttagttttttgggtcgcgttttttcgttttgttttttttggcgtagtatttttttttgggttttttcgagttggttgtgatattaattgtgttaattgtgtgatttttattttttcggagaaggatttatttgggggaatttttatttttagtggattttgttttttttagcggtagttgttattttgggggaggattttttaatgattattgtgggattattat

SEQ ID NO: 704 - DNA, 2001 bp, Artificial Sequence
  chemically treated genomic DNA (Homo sapiens)
ataataattttataatggttattgggaaatttttttttaaagtgataattgtcgttaagaagggtaaaatttattaagaatgaaaatttttttaaatgagttttttttcgagggggtggaggttatatagttggtataattggtattataattaattcgaggagatttagaggaagatgttgcgttaagagaagtaaagcgaaggagcgcgatttaggaggttagcgaaattttcgttaagtttttaggaggcggagagaagtttagtcgttaggtatcggttacggcgtacgttaatatttaggataatttttttttttaagttcgggagtttcggggtaggcgaaaaaggggggatgggagatttatagtttttttaatttttttttttggtttgttaatttttttcgaatttttatgttatataatttttttattatggaaatttttattgggttcggcgttgaggatgttaaattttattttataaggaatatgttaatagttgggtttggggtttgaggaatagagtcgttgcgattggaatagagttcggttattttgttttattattgtttatttcgtagtttttagtttgtcgtcgcgcggtgttcgaatacgagagggtatttttttttagattcggggcgtagaagtttcgcggaggtaggtaattaggttgatgatatttttattatttacgtttattcgtttgttcgttcgcgcgcgttcggtttagtcgttcgtattttttcgggtttttgcgacgtttcgttattatttcgtttattttgtggatagttggaattgtcgtttttttttttttttatttcgttgttttcgcgcggttttttagttaaattattagtgttttggagtcggttgggttgagcgtttttgttcggggaaggtagtttgcgggtttttgtttcgagttcgcggagtaggaggttttttttttaagcgtatttatattatttatgtaaagttaattttcgtcgcgttacggtcgttcgttcgaggatgtgcgttttttttggttaagtttcgtagtttttattttttttcgtttttttttttcggcggcggggtttcggggagcgtcggcgattgggcgtcgcgcgagttttgtaaaatgttaattttttgggcgaagagaggcggtcgtagttagggtcgcgtcgtattttttcggtttttttatttttataggcgtaggaagttattgcggttggggtattagagttttcgttttttcgggtttttcgcgtgttcggttcgtttcggttcgtttttcgggcgttgttttatttcgggttcggggcgtttgtttcgcgtcgcgtttgcgaatcggtgatttggttttttttttagtttttacggttgttcgatttgcgcggcggtggcggcggcggttaagagtaggtaaattcggtttcgttaggggcgtagcgaggaaatggttttttggcgtatatttcgtcgtcgtcgttagttatcgttatcgtttcgggttgtttagtcggtatagacgttttttgttaggtttcgggttagcgtttcgacgcgtttatagcgttcggtttgtcgatttcgatttcgatttcgagttttacgtattcgaggttttcgggtcggtcgttttcgtatttgtttttttaggtgtgggcgttttttttttttttaatttcggtcgtgtttttttagggttggtgacggtgttgtgggtttggtggtcgcgcgtttatttattcgattgtttgcgcgtataggtgcgggtttgggcgttattattttagttggagaagaggaaagaatggggaacgagtgatatcgggatcggagggcgagttttttaggagtacgtttcggttttttttgttcggttcgatcggttcgattcgtgtcgtagcgttttttttttcgtttttaaattatttgtggcgcgtgtcgggaatatagggcgttttggttttttttggggttttcgttggttcgatt

SEQ ID NO: 705 - DNA, 1100 bp, Artificial Sequence
  chemically treated genomic DNA (Homo sapiens)
agattgtattttaataaataaataaataaataaataaataaaggtcgagtacggtggtttatgtttgtaatttttgtattttggtaggtcgaggtagatggaatatttgaggttaggagttcgatattagtttggttagtatagtgaaaattcgtttttattaaaaatataaaaattagggttaggcgcggtggtttatgtttgtaattttagtattttgggaggttgaggcgggcggattacgaggttaagagtttgagattaatttggttaatatggtgaaatttcgttttttttaaaaatataaaaagtagtcgggtgtggtggtgggtatttgtaattttagttgttcgggaggttggggtaggagattcgtttgaattcgggaggcggaggttgtagtgagtcgagatcgtattattgtattttattttgggcgatttggtaaggtttcgttttaaaaaaaaaaaaaaaaaaagaaaaagaaaatatcgggcgtggtggtagacgtttgtagttttagttacgcgggaagttgagttacgagaatcgtttgaattcggatggcggagtttgtaatgaatcgatatcgtgtaattgcgtttcggtttgggcgttaaagcgatattcggttttaaaaagaaaaaaaagaaaataggagaataatgaaattttatttatttattttatttattttttatttttttgagatcgagtttcgttttgttatttaggttggagtgttttggcgtaatttcggtttattgtaatttttgtttttcgggtttaagcgatttttttgttttagtttttcgagtagttgggattataggcgtttgtaattacgttcggtttatttttgtatgtttagtagagacggggttttattatgttgttcgggttggtttcgaatttttgagtttaagtgattttttcgtcgttgttttttagcgtgttgggattataggcgtgagttatcgcgttcggttaaaagttttaaattttagtaagttttaatttattaattttttttttgtatagattggttttttggtgtcgtttaaaaattatttgtttggttttaggttttgaggattttt

SEQ ID NO: 706 - DNA, 1100 bp, Artificial Sequence
  chemically treated genomic DNA (Homo sapiens)
aaaaatttttaggatttagggttaggtaaatagtttttagacgatattaaaagattaatttatatagggaaaaagttgataaattggaatttattgaaatttaaaatttttggtcgagcgcggtggtttacgtttgtaattttagtacgttggaaagtagcggcgggaggattatttgagtttaggaattcgagattagttcgggtaatatagtgaaatttcgtttttattaaatatataaaaatgagtcgggcgtggttgtaggcgtttgtagttttagttattcgggaggttgaggtaggagaatcgtttgaattcgggaggtagaggttgtagtgagtcgagattgcgttagggtattttagtttgggtgatagagcgagattcggttttaaaaaaataaaaaataaataaaataaataagtaaaattttattatttttttgtttttttttttttttttttgagatcgagtatcgttttggcgtttaggtcggagcgtagttgtacgatgtcggtttattgtaaatttcgttattcgggtttaagcgattttcgtgatttagtttttcgcgtagttgggattataggcgtttgttattacgttcggtattttttttttttttttttttttttttttttgagacggagttttgttaggtcgtttagggtggagtgtagtggtgcgatttcggtttattgtaattttcgtttttcgggtttaagcgaattttttgttttagtttttcgagtagttgggattataggtgtttattattatattcggttattttttgtatttttaggagagacggggttttattatgttggttaggttggttttaaatttttgatttcgtgattcgttcgttttagttttttaaagtgttgagattataggtatgagttatcgcgtttggttttaatttttgtatttttagtagagacgggtttttattatgttggttaggttggtatcgaatttttgattttaagtgttttatttgtttcggtttattaaagtgtagggattataggtatgagttatcgtgttcggtttttatttatttatttgtttatttatttattgagatgtagttt

SEQ ID NO: 707 - DNA, 2250 bp, Artificial Sequence
  chemically treated genomic DNA (Homo sapiens)
ttagggtgtttatatagaaggtgtttagaaaaatattttgaattggtttagtttggtaagaatatgggttttggtagtaggaagtttaaatatttgttttattttttattattagtaatgtgattttggataatttatatagttttgttgagatttgttttatttgtaaaatattttttggagttgttgtgaggataaaatgataatatatataaagagttaggttttttttagaagaatgtttttgggtagtatgtatatttttatttttttttttagagagtgggggtaataggatatttttttttttaggggtattttttttttttagggatttatttaagttaggttttttttttagtgaaacgtgtatttcgagggtttttaggatgaagtagtttattggaaggtattagtttttttttttatttttttagagttggatagtgtattaggggtcggtattggttttttagttaggagatattttgggcggggttttgttcgtcggaagtacgtagagcgtggggaggagggttttttttgtttgtgtttgtgttaatagtattcgcgttgtcgcgtcgggtttcggcggtcggagttatatatgatgttatagataatgatataagtcggtgttttatttcgatatagcgttcgagttgtataatgttatattcgggtgttaaatatttggtttcgcgcgattcggttttacgttttttgtcgtcgtttttcgcgttttcgggggaggtggttcggttcggtcgggtagggggttggcgggcgagtttcgcgggcgggttggcgagcgggtgatgttacgggtagcggtgggtgggttattcggaggtgaggcgtcgttaggcgagtttagcgagagtttagtcgtattgtattaggtaaatgaggttcggtttgggtgggggtgtgtgttaaggggaggatatcgggattatttttttttttttcgttttattattttttttattacggtttcgttcggttagggattgattaaattttgggggagtttgggagtcggaattggtataagggaggacgttcgtttttttttcgtttttgttttttcgtagtttttttttttttttgtattcggcgtttttttgtattttgtgtattttttatttggagtttttttttttttttgtttttttttttttttttttttttttaggttgtttttatttgtttgtttatatgtcgtttttttttttcggttttttgcgtttttttcgttgtagtcggacgcgtcgggaatgggttaagttaggggcggtgtttggacggggcggggcggtggaaagggggtggtgttcggaggggagggggcgcgtagagttggggtgggggggtcgtggcgcgtattattagagatcgagcgagtcgttagttgtttttggtttggcgggggcggaatcgcgcgggatttttatttttattcggaattttcgttacggagaatttttggagaagtttcggattttcggttgggaggaggaagtgttcgttgatttttagtttcgcgttgatttcgttttcggtttgcggatttggggagtcgttgtattttgtttcggacgttacgagattttagacgggagttttttcgaggtgaagtcgttgagttttcgggtttcgttaggtttttttgggagagtcgacggatttttttttttagtatatataatttttttgttttttatcgggattggcggagcggtcggcggatttagacgcggggattttagggtagggggcgttttttgttcgggttattagtcggggcgaggggacgtttttttttttttagttgttttgttcggatggcgtcgtcggttgagtgacgggggcggcgcgtaggattttttagttcggattttttgttttcgaggggaaagatgtacgagagtgtagaagtggggggttttatttttaatttttttttagtggtggatttttataattagaatcgggtttgtttgtttttagagaaggggtttttcgtttcgggttcgtattttatttcgtttcggatttcgttttggaatggtttaaattattgtacgtatcggttttttagtttgttgttgtagggggtgggagtgggcggtagggtttttattattattcgggggtgagagtttcggggtgtagtggaggttttgtttttattttttatttaattcgtgttgtttttgttggataattgaattttttcggtcgtat

SEQ ID NO: 708 - DNA, 2250 bp, Artificial Sequence
  chemically treated genomic DNA (Homo sapiens)
gtgcggtcgggagggtttaattgtttagtaagggtaatacgggttaagtgaaaggtagagataggatttttattatatttcgggatttttattttcgagtagtagtggaagttttatcgtttatttttattttttataatagtagattgagaggtcggtacgtatagtggtttgagttattttaaagcggagttcggagcggggtggagtacggattcggggcggggagttttttttttgggagtaaataggttcggttttggttataaaaatttattattaggaagggattaggggtgggattttttatttttatattttcgtatattttttttttcgaaggtaagaggttcgagttgggaagttttgcgcgtcgttttcgttatttagtcggcggcgttattcgagtagagtagttgggggagaggagacgttttttcgtttcgattggtgattcgggtagggggcgttttttgttttgaagttttcgcgtttaagttcgtcggtcgtttcgttagtttcggtgaaaagtagggaagttgtgtgtgttgggagggggggttcgtcggtttttttagggaagtttggcggggttcgggaatttagcggttttatttcgaggggattttcgtttagagtttcgtggcgttcgaggtagagtatagcggttttttaagttcgtaggtcgggggcgggattagcgcggggttgggggttaacgagtattttttttttttagtcggggattcggggtttttttagggatttttcgtggcgaggatttcgggtgggggtggggatttcgcgcggtttcgttttcgttaggttaggggtagttggcgattcgttcggtttttggtggtacgcgttacggtttttttattttagttttgcgcgttttttttttttcgggtattattttttttttatcgtttcgtttcgtttaggtatcgtttttggtttaatttattttcggcgcgttcggttgtagcgggagaaacgtagggaatcgagagggagaggcggtatgtggataggtaagtgggggtagtttgggaagggggaggagaggagagaagtaggaagggggaaaggttttagatgaggagtatatagagtatagagggacgtcgagtatagggagaggagggggttgcgaggggataaggacggaagaggggcgggcgtttttttttgtattagtttcggtttttaggtttttttaaggtttggttagtttttggtcgagcgaagtcgtggtggaggaggtggtggggcggggaagaggggggtggtttcggtgttttttttttaatatatatttttatttaggtcgggttttatttgtttaatgtaatgcggttgaattttcgttgaattcgtttggcggcgttttattttcgagtgatttatttatcgttgttcgtgatattattcgttcgttagttcgttcgcggggttcgttcgttagttttttgttcggtcgaatcgggttatttttttcggagacgcggagagcggcggtaggaggcgtagggtcgggtcgcgcggggttaagtgtttggtattcgggtgtgatattgtgtagttcggacgttgtgtcggaatgagatatcggtttgtgttattgtttgtgatattatgtgtgatttcggtcgtcggaattcgacgcggtagcgcgggtgttgttggtataaatataggtagagggggtttttttttttacgttttgcgtgttttcggcgagtaaagtttcgtttaaggtgttttttagttggggaattagtatcggtttttggtgtattgtttagttttggagagataaaaggaagagttggtgttttttagtggattattttattttagaagttttcgggatgtacgttttattggaagaaaggtttagtttgggtaggtttttagaaagaggggatatttttggaggagggggtattttattatttttattttttaaaaggaaggatggaaatgtatatgttatttaaggatatttttttagaagaagtttggttttttatatatgttgttattttatttttatagtaattttaagagatgttttataaataaaataggttttagtaaggttatgtgggttgtttaagattatattattaataataaagagtagagtaggtatttgaattttttgttgttaaagtttatgtttttattaagttaggttaatttaaggtatttttttgagtattttttatgtggatattttgg

SEQ ID NO: 709 - DNA, 2001 bp, Artificial Sequence
  chemically treated genomic DNA (Homo sapiens)
aggtagataagggttgaagtgaggtagttattcgggaatttattgtagaaggaggtagtagaagagatggagtagagtaaatgagatttgggaaatatttaggaggaagaattaattaagatttgaggattaggtgttgcgaggtgagggagaaggtaatgttaattatgaattttaggtatttgttatgtgttatttttagaaaaagagtaggtttgaggagaaagatgtttggttttgaatatagtttgtagagtttattgtatatataagtggagaggtaagtgggagttgtaggtgtgaagtttagaggagaggtgtggacgggataagtatttaagatttttttatttagaaggaaattgaagttgtgggtgaggttattatagtatagcgtttaggagaagtttaggtaaagaagttgacgaatgtttggattttgataattttaatatataatggtttgatagtggaggtggaggtaatgtagaaagaatgttagaggtaggaaaaagtaagaaggatgtgttattattatgattaaggaagaaacgtgttttaagaataaaggcgttaattttgttttatgttttcgagttgttaagtaaagtgagaaaaatagaaaagcgttttttgggtttagtaatacggaggttagttgttaaagggagtttttagaatgacgacgtcgttaaatttgttttttgtttggattttcggcgatgaaattattatagagatttttaagtttgggtttttgtaaatatagtacgtttttttgatcgttttttaagatatgtaaatagaacgttagtttttagcgtggtaatacgggattgggttgtagtttatttagtcggcggttttcgtcggaagtcggcggaaatattttagcgcgtgggcggagtagcggttcgtagagggaggcggtggcgtttacggaatagtcgcgtttaattggttgagcgcggagtcgttcggtgattggtgggggcggaagggggtcgggcgttagcgttgtttttttttttgtcgggtagtttcgtttttttgcgtagagtttgcggaggggttcggttgtatcggggggatcgcgtttggtagattttagatcgagtagaggcgatttagcgcgttcgggagaggttgtatcgtcgcgttttcgtttagttttttcggattttgcgcgtagagtgagtggtcgtgaggtttcgggtgtcgggggtgggacgcgtagggatagagttttcgggtcgtgtagttggacgtcgggcgaggacgggtcgtttgtgttgattcgcgaatagtgattttagaggaagaacgcgttttgagtattttaagtgcgagtagtgttatttgttttcggagatggtattgtttagtacgattgtttttgttagtcgtgttttggtagtgaagaggatttgtgaaatataatttttttttagaaggtattgtatttttttatttatcgttattttttttcgtttttatttttttttattagttacgttttttttttttcgtagaaagttttatttgttgtatgttattttcgagagttgtttaggttaacgttcgtattttgtgtatataatttcgatagttttggtatttaacgtgttgtgcgtagttgtttttttggttgaatttttaggtttttgttggggtataaggtggtaggttagtaaatgtttatggaattagatgaatgagtatatgatttcggaattttaattatgtttttatgtttaaagatggaagggtttaatgtttttttagagtttaaaagtgatgtttagtttttgtagattttttattttaaaataatatagttttaaaaaaatttttggtcggtattgaagagttttgtggtaggtatgtagaggtgtggttgattgtgttttgaatgttgtttgtatagataaggagttatttttatagaatagaaataggatttgagtttttagtatagtttattgtgtaattattgtttaa

SEQ ID NO: 710 - DNA, 2001 bp, Artificial Sequence
  chemically treated genomic DNA (Homo sapiens)
ttaagtaatggttgtataatggattgtgttggaggtttaagttttgtttttgttttatgaaaataattttttatttatataaataatatttaaagtataattaattatatttttgtatatttattatagaattttttagtatcggttagaaatttttttaagattatattattttggggtggggggtttgtaaaaattaaatattatttttaaattttaggaagatattaagtttttttatttttgaatatagaaatataattaagatttcgaagttatgtatttatttatttgattttatgaatatttattgatttgttattttgtgttttaataagggtttggggatttaattaaaggagtagttacgtatagtacgttaggtgttaagattgtcgaggttatatatatagagtgcgaacgttaatttagatagttttcgaggatggtatatagtaaatgaaattttttgcgaaaagaagaaaacgtgattgatggaaaggggtggaaacgggagaaagtgacggtaaatgggaaggtgtagtgttttttagaggaaaattatattttataagttttttttattgttagagtacgattggtaaggataatcgtgttgagtagtgttattttcgagaataggtggtattgttcgtatttggaatatttaggacgcgttttttttttgggattattattcgcgggttagtatagacggttcgttttcgttcggcgtttaattgtacggttcgaggattttgtttttgcgcgttttattttcggtattcggaattttacggttatttattttgcgcgtaggattcggaagggttaggcgggggcgcggcggtgtagtttttttcgagcgcgttgggtcgtttttgttcggtttggggtttgttaggcgcgattttttcggtgtagtcgagttttttcgtagattttgcgtaggaaagcgaaattattcggtaggagaaaaggtagcgttggcgttcggttttttttcgtttttattaattatcgggcggtttcgcgtttagttaattagacgcggttgtttcgtgggcgttatcgtttttttttgcgggtcgttgtttcgtttacgcgttggggtattttcgtcggttttcggcgggggtcgtcggttgggtgagttgtagtttagtttcgtgttgttacgttgggaattggcgttttgtttatatattttagagaacgattagaaggacgtgttgtgtttgtagaagtttaaatttggaggtttttgtagtagttttatcgtcgagaatttaggtagaggatagatttggcgacgtcgttattttagaagttttttttagtaattgattttcgtgttgttaaatttagggaacgtttttttgttttttttattttatttgatagttcggaagtatggggtagagttgacgtttttgtttttgaaatacgttttttttttggttatgatgataatatattttttttgtttttttttgtttttggtattttttttatattgtttttatttttattattaaattattatatgttaaggttgttagggtttagatattcgttagtttttttatttgggttttttttaaacgttgtgttgtgatgattttatttatagttttagtttttttttagatggaggagttttaaatgtttatttcgtttatattttttttttgggttttatatttataatttttatttgtttttttatttgtatgtgtagtgagttttataaattatgtttagaattaaatatttttttttttaaatttgttttttttttagaaatggtatatgatagatatttaggatttatagttgatattgtttttttttttatttcgtaatatttgatttttaaattttaattgatttttttttttaaatattttttaagttttatttattttgttttattttttttgttgtttttttttgtagtagattttcgaatggttgttttattttagtttttatttattt

SEQ ID NO: 711 - DNA, 2001 bp, Artificial Sequence
  chemically treated genomic DNA (Homo sapiens)
atatggaaggtcgattttttaaaattagtgtaagaaaaatgataataagttatatttggagggatttcggggattatttattcgttggatttaaagttgaggaagtcgcgggtagtaaataaggttttatagttgttggtggtagagtagagattatagattaaattgtttgagtttaaatttaatgttttttttttttagattgttattcgtatatatacgtatatatgtatatttttttggaggtattgtatagtaagtatagaagtacgttattgagttttgtgtttttaaagtatttgattgttttttcgttgggggaaagggtaggtagaaaataagatttcgtgtgttgtcgttgtgtcgttttttgtttttttgattcgcgttcgtagagaaagttttaagagtcgttttaggtttttttttacgttttttttttttttgttgtagttgagtttttagagcgtgagcgcgtaggatgatatttggttggttgagagttgtcggggaggcgttggcgggtgtcgagagcgtattgattttgacgcggggtgtagtacggttgggaagttttcgggtttttggttaagcgcgtcgggggacggtataggggggcgacgcgtatttattatttggttcgcgttttttcggttttcggtagtttagggcgggttcggttggggattttaatggttgggtgtcggttttgggagaagggtacgcggagggcggagggttgcgtttcggtttcggttcggttttaacgttttttttttggcgcgtaggtttagaaatagggcggttttttcggtcgtcgtttcggcggttcgggtttttatatatagttatatttatcgttaattgggaggtcggcggtcggtagcgaatgggcgagcggttttcgcgggaggagcggggagggggtacggggcggagggaggagaggaggaaggggggtaggagaaaaaagtttttttaaaaaagtattggttgttttgaggaatgcggtcgtttttttgggaaagtatatatttgggagaagtaggcggtttcgcgttcgtattttcgttttttcgttcgatcgcgcgttcgtttcgtcgtttttgttgtagttttagggtttttcgtcgtcgttattatggacgttattaagaagaagatgtagatgttgaagttcgataaggagaacgttttggatcgagttgagtaggcggaggtcgataagaaggcggcggaagataggagtaagtaggtttgcgttttttcggttttgcgttcgcgtttagagcgtcgggattcgagtttggtattttcggttggatttttatttcgaggattcggggagttattattttatttttattattatttagggcggttagggcgcgcgtttggaaagaaggaagggaaacgtaagagttaggtttagtttaatttagtttggtttgaggacgtttattttttttttttggtttttatggttcgcgaaattaagttttagaggcgttttatttttaggattgggaattagtttgggggagggaggaggatattcggtttttggggacgtttgaaggaagggcgagggatggagaaagggggtcgagtaatttaagtgttagaagttcgttgatttttgattggggagaaaggaattttaaatttggggaggagaagggagttttggagttgttatttaagaataaagatggggcggaatggaggttatagttcgaaagttaggttagtagtggcgtttttttgtgtttttaagtagtggatttgagttcgttgagatttcggtaggagtttcgttttagggtaggtgggtgtgcggggtgagtcgcggagcggttttagttcgggtaaagaggaagttatttcgggttttttgtattttaattcggcggcgtttcgagttcgaggggttttagttaattcgacgttcgtgtgttgtgtgtgtttaatattcggttcgtgtcggtcgttcgcgttcgt

SEQ ID NO: 712 - DNA, 2001 bp, Artificial Sequence
  chemically treated genomic DNA (Homo sapiens)
gcgggcgcgggcggtcggtacggatcgggtgttagatatatataatatacgggcgtcgggttggttggggtttttcgggttcggggcgtcgtcgagttggagtgtaaaggattcgaggtaattttttttttattcgagttggaatcgtttcgcggtttatttcgtatatttatttgttttgggacgagatttttgtcgaggttttagcgggtttaagtttattatttggggatatagaagaacgttattgttggtttggttttcgggttgtagtttttatttcgttttatttttgtttttaggtaataattttaggattttttttttttttttaagtttaaggtttttttttttttagttaaaagttaacgaatttttaatatttgagttattcgattttttttttttatttttcgttttttttttaaacgtttttaggaatcgggtgttttttttttttttttaaattgatttttagttttgagaataaagcgtttttaggatttgatttcgcgggttatgggaattagagaagggaaataagcgtttttagattagattaagttagattaagtttggtttttgcgttttttttttttttttttagacgcgcgttttggtcgttttgggtggtggtgggggtagggtggtggtttttcgagttttcggggtggggatttagtcgggggtgttaggttcgagtttcggcgttttgggcgcgggcgtagggtcggggaggcgtagatttgtttgtttttgtttttcgtcgtttttttgtcggttttcgtttgtttagttcgatttaaggcgttttttttgtcgagttttagtatttgtattttttttttgatggcgtttatggtggcggcggcgaggggttttggggttgtagtaggagcggcggggcgagcgcgcggtcgggcggaggagcgggagtgcgagcgcggagtcgtttgttttttttagatatgtatttttttaagggggcgatcgtattttttaagatagttaatatttttttggaaaagttttttttttttgttttttttttttttttttttttttcgtttcgtgtttttttttcgtttttttcgcgggggtcgttcgtttattcgttgtcggtcgtcggttttttagttgacggtggatatgattatatatggggattcgagtcgtcgaggcggcggtcggagaggtcgttttgtttttaaatttgcgcgttagggagagggcgttggggtcgagtcggggtcgaggcgtaatttttcgtttttcgcgtgttttttttttagggtcggtatttagttattagggtttttaatcgagttcgttttgagttgtcggaggtcgggagagcgcggattaggtggtggatgcgcgtcgtttttttgtgtcgtttttcggcgcgtttagttaaaggttcgggggttttttagtcgtgttgtatttcgcgttagggttagtgcgttttcggtattcgttagcgttttttcggtagtttttagttagttaggtgttattttgcgcgtttacgttttggaaatttaattgtagtagagaaagggagaacgtgggagaaagtttggggcggtttttgagattttttttgcgggcgcgggttagagaggtagggggcggtatagcgatagtatacggagttttgttttttgtttgtttttttttttagcggagggatagttaaatattttagggatataggatttagtggcgtatttttgtgtttgttgtgtagtgtttttaaaaaggtgtgtatgtgtgcgtgtgtgtgcgggtggtagtttaaggggaaagaatattgagtttagatttaggtaatttggtttgtggtttttattttgttattagtaattgtgagattttgtttgttgttcgcggtttttttaattttaaatttagcgggtagataattttcgaggtttttttagatataatttgttattattttttttgtattgattttagggagtcggttttttatgt

SEQ ID NO: 713 - DNA, 2002 bp, Artificial Sequence
  chemically treated genomic DNA (Homo sapiens)
tttttatttcgaaaggagttatttttttgtagttttttagttgcgaaaagaggaggaagttggttgggtcgggggtcgcggggggtatttttcgtagatggcgggatttttttgtcggttatggtaaaaacgaggtttgttttttttatcgtttttaattttagtttttggtatattgttgaaagtaattgaataaaatcggaaattcgagaaggcgttcgttcggattggtgagattttgaggggagaaagaagcggggatttcgtcggtattagcggcgtttttttttcggttatcgttaatttttattttagagggtattgtttcgttatttagtttaggtttttttgcgagagtttcgcgggttcgcgtagttttcgcgattcgaatagatttttagtttttggaggaatgtttgtttttttaataataaaaaattaaagaagcgtttataaatgttaagttttttcgtattatgcggagtatagaggataacgattatagttatttttgaatttcgtttacggtatagcgtcggagtcggggtttggggcgtcgttttttggggggtttcgatttttagtcgttttcgttttattcgggtcgttaaggggttgggggaggcggcgttcggggtaatcgggggagatttagggcgttgggggtatttggggaatttatgggggtttaaaggaattaggagatcgggatttcgaaggggatttggggggttcggggttttcgggggcggtcgggggttcgcggattcgggaagttttgaggatttagaggtcgggcgcgtttcgttcgcggcgtcgtttttttcgtaatttttttagttttcgagggaagaggcggggtgtggggtgcggttaaaaggcgttacggcgggagataggtgttgcggtttcgtagcgttcgcgcgttttttttttcgattcggagtttttcggcggcgttcggtttaggattcgtttaggagcgtaggagttttagcgtagagattttaacgtcgagattttcgtttcggtttcgtcgcgttttttttcgacgtaggtgagttcgtcggtttcggattgttcggttaggaatttggcggcggggagggatcgcgagatttagagcggttgttcggtcgcgtgggtttcggggaatcggggggttggattaatatacgtttttgggtcggggggcgggggtcgttttttggagcgggcgtttttgcggtcgagtttcggagttggaatggggcggtcggggaagtggacgcgatggtatcgttcggggtgcgagtggggtcgggcgcgcgcgggaggggaaaaaggcgcgggcgagtcgttagcgcgaggtttgtggtgtcgtcgatgttttttcggggtattttagcgtagtcgtttggttatttgatttattgttattaaacgttttaaatttatcgaaagtttagtttcgaagtaaagtttcgtttcgtcggtgaagtaggaagttttcgttgtaggaattgatttttattttttggagcggtttttgtagaaaaattttcgggtagagatttgggcggagtttgtttagaattaacgcggagttagtcgatttcggtttatttcggggttaagattttagtggttttttttttttttaaatattttacgagggtttgttttcgggttgtgtttttcgtttagaaggaaaatttttaggatttttgttcgcgaagaggtggtgtgcggttgagattcgcgtttttaggacggttttattagtgtttcgattttgttttattggaggaggaaggtagttcgaatagcgtttatttaattaatagttgttgagagttgggtttcgtggttatgtatttgggattgttttgagaagcgtggtacggtcgtgtttttatgtgattttagagtttttttcgaaattgttgtgtatagtcggttataattttagatattggtgagaagggtggaggaattttttggggatagttaggtaaggtcg

SEQ ID NO: 714 - DNA, 2002 bp, Artificial Sequence
  chemically treated genomic DNA (Homo sapiens)
cgattttgtttggttgtttttagagggtttttttattttttttattagtgtttgaaattgtgatcgattgtgtatagtagtttcgaaagggattttaaggttatatggggatacggtcgtattacgttttttaaggtagttttaggtgtatggttacggaatttagtttttagtagttgttagttaggtgagcgttgttcgggttgttttttttttttagtggggtaggatcgaggtattgatggaatcgttttgaggacgcgggttttagtcgtatattattttttcgcgaataagggttttaaaaattttttttttaggcggggagtatagttcggaaatagattttcgtgaagtgtttaggaaaaagggaagttattgaaattttggtttcggggtaggtcgggatcggttggtttcgcgttagttttaggtaaatttcgtttaaatttttgttcggggatttttttgtagaagtcgttttaagaggtaaaggttagtttttgtagcgaaggttttttgttttatcggcgaaacggagttttgtttcgaagttaagttttcggtgaatttaaaacgtttggtggtagtgggttaagtagttaggcggttgcgttagagtatttcgaagggatatcggcgatattataaatttcgcgttggcggttcgttcgcgttttttttttttttcgcgcgcgttcggttttattcgtatttcgggcggtgttatcgcgtttattttttcggtcgttttattttagtttcggagttcggtcgtagaaacgttcgttttagaaggcggttttcgtttttcggtttaaggacgtgtgttggtttagtttttcggtttttcgagatttacgcggtcgggtaatcgttttgggtttcgcggttttttttcgtcgttaggtttttggtcgggtagttcggggtcggcgggtttatttgcgtcgggaggaagcgcggcggggtcggggcgggggtttcggcgttggggtttttgcgttggggtttttgcgtttttaggcgggttttgggtcgggcgtcgtcgaggggtttcgagtcggggagaggagcgcgcgggcgttgcggggtcgtaatatttgtttttcgtcgtggcgttttttaatcgtattttatatttcgttttttttttcggagattgggaaagttacggagggggcggcgtcgcgggcggagcgcgttcggtttttgggtttttagagtttttcgggttcgcgaattttcgatcgttttcgaaagtttcgaattttttaagtttttttcgaggtttcgattttttagtttttttgagtttttatgagttttttaagtgtttttagcgttttgagtttttttcggttatttcgagcgtcgttttttttagttttttggcggttcgggtgaagcgggggcggttgagagtcgggattttttaggaagcggcgttttagatttcggtttcggcgttgtgtcgtgggcggggtttagggatggttgtggtcgttgttttttgtatttcgtatagtgcgagaggatttggtatttatgagcgtttttttaattttttattgttagagaaataggtatttttttaaggattgaagatttgttcgagtcgcggaggttgcgcgggttcgcgaggttttcgtagggggatttaggttgggtggcggggtagtgttttttggaatgggggttaacggtggtcgaggagggggcgtcgttggtgtcggcgaagttttcgtttttttttttttttaaaattttattaattcgaacgaacgttttttcgaattttcgattttatttaattatttttaataatgtgttaaggattaaggttgggggcggtgggagagataagtttcgtttttgttatggtcggtaggggggtttcgttatttgcggagggtgtttttcgcggttttcggtttagttaattttttttttttttcgtaattggggaattgtaaggaggtgatttttttcggggtgagga

SEQ ID NO: 715 - DNA, 2001 bp, Artificial Sequence
  chemically treated genomic DNA (Homo sapiens)
gaattcggtttttgttttttttatttttgttattaggtgtttgtcgcggagttgcggtttatttgggagacgagcggggttgatacgcgcgtatatattattgttatttagttgtcgtttggttttgtttggagtagtggattttattcgtttatttgttatcgagttattttttagtacgttttagtaggacgttgatatttttaattttggtttttgtttttttatttttttcggtttgtttggtttttaagttcgtttttagttagtttttatttagttttcgtagtagtttttattttttatttggttttttggagtttttcgtcggagtgttgattagtggatatttttgttcggttgcggcggttcgattgtttttttgttttttttgcgtgatttcggggtaggttttggtgtagagcgtcgttaaggacgtcgagcgggaggcgggattgtttagatattttttagcgaagtgtatgtgtgtttgtaaattatcgttggttgtcgggagatcgcgaggatcggtttaggttgcggcggagtcgagggcgagggagaggtcgcgtgagtgagtagagtttagagtcgtgcgtttttagaattgcgcgttcgtttcgtgtattttcgcgcgttatgtttagttgtttcgcgcgttttgttacgggttcgttgggttttcgcgttttttagttttcggagtttattttgatcggggttataatatttattgagatttttttttttgttttgtattttcgttattggtatcggatttgtagaagcgtgcgtgggattagaggatcgttttttttataataatcggtttttgtattttagtagtcgttggaagttttagtttttttatcgttaagtttatttttgggagatagaagacgcgtgatttttttttcgttgtttttggggtttttttgtagttttggttaggcggatttatttttaggatttaaagttgtttaaggagtttttgttttgttagaggagggtggagagggcggtgggaggcgtgtgtttgagtgggttttattgttttgttttatattatttggtgtatattttttttggtattttgggttgttagtttcgtcgggtattgggttttagatattgcgcggttttttcggagtagtaagttaaagaaagtttttagtgtcggcgaggaaggaggcggcggggaaagatgcgcggcgttggttggtagatgttgtttttgtcgttggggttagtgttggcgattttgaataaggtggtatcgtaggcgtgttcggcgtagtgtttttgttcgggtagtatagtggattgttacgggttggcgttgcgtagcgtgtttaggaatatttttcgtaatatcgagagattgtgagtatgcgtttttcgtttttttttttttttattcgggtcgcgtatttttgtttttattggaggaatttgttagtttagggttttgtgtttggggtagttttcgttagtttttttttatgtatattttggggttgagtttttcgggagggtattggttagggaagggtttttgtttaaggaggggcgggttcgttggtagttgcgttagtttttttttttttgttttcgtttcgttattcgtagttttttgttggttagttttttggggttggggagcgggtagataggggataagtattggaggatgttcggggtaagtgagacgttattttgttttttagagtttataaacggagttattttgcgattgttagtatttaggtcggttttagagtttagttttcgtttttgtcgtaggttggcgcggaggggatagtagggagatttaaaagagagaaatttgtttttttcgattttttgttatttttttgggggcgaaggttaggaagaaggggttatggagtgtttgggggtgttttttataggtcgcggggagaagggtgttttaggacggcgatatttcgtatagtagtttcgcgtagtttttcgtttttt

SEQ ID NO: 716 - DNA, 2001 bp, Artificial Sequence
  chemically treated genomic DNA (Homo sapiens)
ggggggcggggggttgcgcgaggttattatgcgaggtgtcgtcgttttggggtattttttttttcgcgatttgtgagaagtatttttaggtattttatgattttttttttttaattttcgtttttaggagggtgataaaaaatcggggaaggtaagttttttttttttgagtttttttgttatttttttcgcgttagtttgcgataagagcgaggattgggttttgaaatcgatttggatgttggtaatcgtaaggtgatttcgtttatggattttggagaataaagtggcgttttatttgtttcgggtattttttagtatttgttttttatttattcgttttttagttttagagaattagttagtaaggagttgcgagtggcgggacgagagtaggggagggagaattagcgtagttgttagcggattcgtttttttttggatagaggtttttttttggttagtgttttttcggagagtttaattttaggatgtgtatgggggagagttagcgagggttgttttaggtataggattttgagttgataggtttttttagtggaggtaggggtgcgcggttcggatggggagaggggaagacgaagagcgtatatttatagtttttcggtgttgcgggggatatttttgggtacgttgcgtagcgttagttcgtgatagtttattgtgttgttcgagtaagagtattgcgtcgggtacgtttgcggtgttattttgtttaggatcgttagtattaattttagcgatagggatagtatttgttagttaacgtcgcgtattttttttcgtcgttttttttttcgtcggtattgggggttttttttagtttgttgtttcgagggaatcgcgtagtgtttgaggtttagtgttcggcggggttagtaatttagagtgttagggaaaatgtgtattaaataatatggaataaggtagtagagtttatttaggtatacgttttttatcgttttttttatttttttttggtagagtaggagttttttgggtaattttaggttttgaggatgaattcgtttggttagggttgtaaggagattttaagagtagcggagaggagattacgcgttttttgttttttaaggatgaatttggcggtaaaagagttggggtttttaacggttgttaagatgtaggggtcggttgttgtggggagggcggttttttgattttacgtacgtttttgtaaattcgatgttagtggcgaaggtataagatagaagaggggattttaataggtattatggtttcgattaaagtgggtttcggaagttagaaggcgcggaagtttagcgggttcgtagtagagcgcgcggggtaattgggtatggcgcgcgggggtgtacggggcggacgcgtagttttgggggcgtacggttttggattttgtttatttacgcggtttttttttcgttttcgatttcgtcgtagtttggatcggttttcgcggtttttcgatagttaacgatggtttataaatatatatgtatttcgttgaaggatgtttgggtaatttcgtttttcgttcggcgtttttggcgacgttttgtattaggatttgtttcgaggttacgtagaaaagataaaagggtagtcgggtcgtcgtagtcgggtagaaatatttattagttagtatttcggcgaggaattttaagaggttaagtggaggatgagagttgttgcgaagattgagtggggattgattgggggcggatttaaaaattaggtagatcggaaggagtggaaaggtaaaggttaaggttggaggtgttagcgttttgttggggcgtattggagaatggttcggtggtaggtgggcgggtgggatttattattttaggtagagttaggcggtagttgaatggtagtagtgtgtgcgcgcgtgttaatttcgttcgttttttagataagtcgtagtttcgcggtagatatttgatggtaaaggtagaagaaataagagtcgggttt

SEQ ID NO: 717 - DNA, 2001 bp, Artificial Sequence
  chemically treated genomic DNA (Homo sapiens)
ggaattttatttacgttcggtttttttatttatttcgtttatagcgcgtgttttagtttagggcgtgcgtgcgttcggtgttcgatttcgggttgtgtgtgtttatttggcgagatgtcgagagcggggggagtgtttttgtcggtgtatttgggtttaggttaggggattttttttttttattttcgcgtgggtgtgggggtgtgttcgggttagggcgcgtgtgtttttgtgtttgtgcgtgcgtgtgcgggttagggtggtgggatcgcgtattagggtagggtgtttgcgtttgcgtttgggtttgtttggtttgtatgtcggcgcgatttcgatttggattcgtgtttttggatgtcgagaggttagcgtggtgggggtgtttagtttttcggaggagtattatgttttgatattttcgttttatcgttttaaagttggtttggggtttcgtagggagtggtttgtatggggagggttcgcgtgttgtgtttttgggaggggtaagagagtgggggcgtagggggcgggttaggtttttgggcgcggcgcgggttcgggggattcgcgcggttgacgttaggttattttttaaatagagtcggtagcgcgtttcgttcggtatttttcgaagagttagatcgcggtcggcgttagcgttatcgttcggtttattcgttagttcgtatagtcgcgtcgtcgtcgagcgtttcgtgagcggcgtttcgaggattaggaatggggtttcgggcgttgggcgcgtttcgaattcggcgtacgtaagagtttgggagcgttcgagtcgttcggttgttcggagttttatcgtttaggatcgggagatgttggaaatgtaatcgtttgtttttcgaggagtcgttgttttcgggattttttggtattgtgcgtattttggttagtagttttcggagaagacggcgtttttaacgttcgattcgcgtggtcgtggtagcgttacgcgagttttttaggcgatcgtagggttatagtagtttagtcgtcggtgttttttcggaaattatgattttcggcgcgggtttatggagttatggtttatagggttttgggtcgcgcggggttattttagtcgcggagggcgcgtaggttgtttttcgtttttacgttttcgtttttttgtatttatttgtgttatagttttttgtgttgttgcgacgatttgggtcggagtcgttttttcggcgcgtttcgttgttttcgcggttttagcgcgggcggttagaaatttttttagaagtttcgtttttgtgattttttcgggtcgacgtttagcgagtttagcgtttttagcgcgttcgtcgtcgtcgtgttcgtttttcgttttttcggttttaattatttcggtttatttaagttgggtattaagcggttgttttaagtttttattgtgggcgtgaagaaggggggtattcgggtcgtgttggagtttattcgagtatattcggacgtgcgggttttgggtacggaattttatttttttgataggaattacggtcgcgggttggattggtataggtaaggattaggagtttcgtttcgtgcgtcgggtttttgatcgtttttattgggagagttattcgttttttgtgtttttttttttttttaatttaatttattgtatgggtttaggttgatatatagggttatggggggttatagtagaatttatttagaattttttagtgataatttagacgggtagtttttggaattgtaaagggcgttttttcgttattggagtcgttggaaaaggattatttttagttaaatttaagtgttagttaaagggttaattttttttgtgattagtttttagggtgtttaaggaagggataggcgaggatttgtgttgtttgaatacggtattattttaattttttgtaggtttttgttggtatttagtttttgaaggattttgagaaagataaggtagtttagagattttttgtagtaaggttt

SEQ ID NO: 718 - DNA, 2001 bp, Artificial Sequence
  chemically treated genomic DNA (Homo sapiens)
gagttttgttgtaaggggtttttgaattgttttattttttttagggttttttaggggttgggtattagtaaagatttatagagggttaggatggtgtcgtgtttaggtagtataggttttcgtttgttttttttttgggtattttaagggttggttatagagggagttagttttttagttggtatttaggtttgattggagataatttttttttaacgattttagtgacgagggaacgttttttgtagttttagaaattgttcgtttagattattattgggaagttttgggtaaattttgttatagttttttatggttttgtgtgttagtttgaatttatataatgagttgggttaaaagaaagagaaaatataagagacggatggtttttttaatggaagcgattagagattcggcgtacggagcggagtttttggtttttatttgtattaatttagttcgcggtcgtagtttttgttaaagaagtggggtttcgtgtttaaggttcgtacgttcgggtgtattcggataaattttagtacggttcgggtgttttttttttttacgtttataatgagggtttggggtaatcgtttggtatttagtttgggtgagtcggagtggttggaatcggagaggcgaggggcgggtacggcggcggcgggcgcgttgggagcgttgggttcgttgggcgtcggttcggagggattataggggcgggatttttggagaagtttttggtcgttcgcgttggggtcgcggaggtagcgaggcgcgtcgaggaggcggtttcgatttaggtcgtcgtagtagtataggaagttgtaatataggtaagtgtaggagagcgagagcgtgaaggcgaagagtagtttgcgcgtttttcgcggttgaggtggtttcgcgcggtttaggattttataggttatggttttatgggttcgcgtcgggggttatggttttcgagggggtatcggcggttgagttgttgtggttttgcggtcgtttagagggttcgcgtggcgttgttacggttacgcgggtcgggcgttgggggcgtcgtttttttcgggggttgttgattagggtgcgtatagtgttagggggtttcgggggtagcggtttttcggggaataggcggttgtatttttagtatttttcggttttaggcgatggggtttcgggtagtcgggcggttcgggcgtttttaggtttttacgtgcgtcgggttcggagcgcgtttagcgttcgaagttttatttttgattttcggagcgtcgtttacgaaacgttcggcggcggcgcggttgtgcgggttggcgggtggatcggacggtggcgttggcgtcggtcgcgatttggtttttcgggaaatgtcgagcggagcgcgttgtcggttttatttaaggagtggtttgacgttagtcgcgcgggtttttcgagttcgcgtcgcgtttagggatttggttcgttttttgcgtttttatttttttattttttttagaaatatagtacgcgggttttttttatgtaggttattttttacggagttttaggttagttttggggcggtgaaacgaaggtgttaaggtatagtattttttcgggaggttggatatttttattacgttggtttttcgatatttagggatacgaatttaggtcgagatcgcgtcgatatgtagattagatagatttagacgtagacgtaggtattttgttttgatgcgcggttttattattttgattcgtatacgtacgtataggtatagaagtatacgcgttttagttcggatatatttttatatttacgcgggggtggggaggagaagttttttaatttgggtttagatatatcgataaggatatttttttcgttttcgatatttcgttaaatggatatatatagttcggaatcggatatcgagcgtacgtacgttttggattgggatacgcgttgtagacgggatgggtggaggagtcgagcgtgagtgagatttt

SEQ ID NO: 719 - DNA, 5650 bp, Artificial Sequence
  chemically treated genomic DNA (Homo sapiens)
ttttggaagtatatttgtttttagtattttgtttttttattgggtgttttttgtagatggttaacgtagttattatattcggattttttttgattttatttttagaggattattttattttgaagtgttgaaggttttaggtattatttataacgataatttttaattttttagtttatttttagtttgtgttttttttcgatttaatttatttttaattacgtgttaggtttttatttttggatgtcgaagagttatttttagttttatttagtttatttttattagaatatttatgagtcgtcgtttttgtagtttatttgtttgttcgtttgggaatagtaagttttttaagggtaggattattatcgcgtttttagaggcgttgtattggaatatcgcgggtatagggtagcgttggttattgtttttgggtattagggtagtaaataaatttagtagttgcgtttgtttgtttggagttggatttttttggtatagatttaaacgtagaagtataaggtttacgtttatgtatttgttagatatttaatgatttttaacgatagatatgtttttttaatattttttttagtttttttgattttttgagaatttttgaattacgtaggattttagttttagggtgcggtcggatttgtcgcgacgttagtcgtcggggttttttttcgaggcgtcgttatgggattcgcggtgatttacgaggggcggttgggtggtggttattgggcgacggcgtagggttaagggtcgggttttgggatcgtggggagatcgggggtttcggagttttttagtttcgtaggttattgtttcgtcgttcgacgttattttcgattggagttaagatggcggcggcgcggtcgcgggcgtcggggtcggcgaaatagcggcggcggcggcggttttcggtgttttgaggcgttggcgcggcgggcgcgggtaaggagtggcgcgggtgggcggtttttgggttcgcgtcgggacgttggttttttttttcgaggagcgcggcggcgacggcggcggcgatacgttggggattcggcgtcgtagggatggtcgggtcggcggacgcgtttttttagaggtttcgggcgtgtcgggggtttcgggacgaggcgcgggttttcgggtcggtggtttcgcgggtgggtggcggcgtcgggtttttttttgtcggtcgtggggtttttgcggcgaagttcgggattcggtttgtcgtcgtgaagagtcgcgcgtttcgcgggggacgcgtgcgggttgtagagattggtcgggtgcgggcggcggtggggttatttggggttttacgtggggtcgggcgtcgttttaattgttaagtcgttgtgttttttttttttgtgtttttattgagtgtgttttgtatatttgtattttaaatttgttttgtgttttgcgtttttgtgttttttaaatagtttttgtgtggttttaatttggagattgttttttttaatgtttttatagatttacgggtgtatgtgtgtgtgtgcgtacgcgcgcgtgtgtgtgtgttatagacgtgtaattttgttattaattttgttaataaagttattaatgaattttttttgatggtggtaagtgagatatgaagtaaatttaataggttagtgttattttttaaattttcgtggttttttcgatttacgcgtgagttatcgatttttcgggtttgtagttttgtgtcgggttgtgagttgcggtaaagattttatagttaatcgggaagttttgatttttttaattacgtagttgaaattttttttaatagaaatttcgtgttggttttttattttttttttagtgttgtattgagattttgggtgtatttgagacgtggaacgttttttgttgaattttagtaggtttttagatttttttaattagatattagaagaattatttttattttagaattcgattaaaatgtttaagtttttgtttattttaggtttattaaaagtgatcgaaatttttaataataaatggaattttttaatgattttttttataatggtatatatttcgtttcggtttgattagttgtgtttaagtattagaaaaatgtaggttttttaaaaaaaaatatgataggaaatttatatatattaaggaggaggaattgagatatattgttatacgtttttttttagtagggttttgtgtttttgagatggtttaaattgttttattatttttgaggttttcggattaatatttattggttaaatttttatatgtagaattttagtttagttttgagatgatttttaaagattatttttattaaatttttttatttcgagttatggaaataaattaaaatttatagtggaattaaaatttatttatattttttgtgattttagggttttttttatttaatatatttgttttggtttgattgaaataagttaatatattttaagtgtttagaaaagtgttagaatatgataatattgtttagtaaatgtttgtttttgttgattttgaaggtggtttttttaattgaaaggttggtatgtttaggtttgttttttttttattttgtggatagggtttgaaatagtatagtttaaatttgtaagaatgtattaattttgtaagtataaaatataataaaagatttttattgtagaaaattggaaagtagagaaaagtataaagaagaaatagaaattgggtataatttttttttttttagataattattgttaacgtttggtagatttttttgttttttttggtgtggatatgcgtatttttttttttattttatagtttatttatatatatatatatttatttatattttatataggattgataatatagtgtgtatattgtttgtaatttgttttgttttatgatacggtgagtatgtatttatgttattaattagttaatattatgtttaatggttatttaatatgtggatgggtcgtaagttattaattaagtttatattgatttgtaaggttttttaagtttgagttttttttttattaagatttgtttgaaagtttttttaaaatcgtgggttttaaagttttgtaattttttgagattatagtgaaaaatataaattttgttttttagtatttaaataagtattttttttgcgggtgtagttataagaagtaatatttaattttagttttttttttttcgtttttggttgtggttgtgtagttatgtatatatatttgcgtttatttttttgatgattattttacgttagatgtttatttatttatgagattgtttttttaagtagtttgtttttttttaagttttaaatttgatttataaattttttttaagttttgttaaattatagattttttaggatggaaagtattttaggttatttattatttttatgttttttgagtagttttttatgttatttttaatatttatgtagaaaaaaaattaaaatagcggatttttattagaaaattttataatggggagtggaagaggaggaggttgatggttgggggaaaatcgttaaatttgtatgacgatgggtagttaagggagtttttagatgatgagggatattatttgattgtttttattatagataattgtcgttttgtgtttagggttttacgttttgtgcgttgagtattagttatgttgttatttatggttataatatttggttagaggtttggggtggtggtttatttttttttttttgaagttataagtttttagttagagttataaaaattatttttatggagtgtttgaaagttgtggattttattattgaaaataatatttagtttttattaaagtagagttttttaatttttgtatttattgatatttgggtgagagaattttttgttgtggaggacgattttgtatattgtaggatgtttagtagtatttttgttttttattagggagatgttagtagtatttttttttagtgtgatagttagtaaaatttttagatatttttaaatagtatttgaatcgttgtagtgaaggaaggtttatttaattgtatggttgaattattgaaatagattattgaatttttttaagaattgtaaggatagattagatggtttatattttgaagttaagaagtggattttaggtttgtttacgtttttttttatttttggttttgtgattttattgaatggttagttttagtatttttgtttcggtattagttttgtggtatgaggtaaaataatgtgaggtattttggagattataaaggagtttttatgacgtggaattagtatttttagtatgtagattaaattatgaaatttgaataaatttgtatagagttgatgcgtggtaaataatttaagtatatagattattatgttgaatagcgtagaaataattgttttttagaaaagtaatttggtttagtaattttttgaagattgatggtagaggttatgttgtagttttttcgaaatttgtttttttgaaaataattaatttgaggttatgtatagaaatggtgagtttgttttgaggtaataaggtttatttttgaagtgtttatttaattttaatttaatatattataatttaaagatagtttattgatttttgtggaaaatatgtagtattaatgtagtttttttttagggggaaaagtataagttgttaaatttttatttgtaatttttttaagtgtagatagtattgattgaatttttattgtggtatacgtaatttttagtcggaatgtattgataaataaaacgtgaaaagagatgtgtttttggagttatatttggtaggggtggttttttgaattatagaatatttgtataattttattggaatgaatgtatgtgtcgtttaaatatttttttttaaagagaatgttttttattttttatttttatttttttgaggtatgaattagagttattgtatgtagtaaatttggtttatttggaatgaaatatgtttatagtattttttttagtattgtatagtatttatttttagagttttggtttatgttatgtttatattgtgtttttatttattagttttttggaatatgtaataaaggagattttattgaatatttattattttttagttattttggtgaaaagaatattttgtagtttttgtaataaattatattttgggttttgttttgaaagagttgaattattttttggtatagtttgtttgaaatatgtaaagttaagtgtaagtgttagtttgattatagggggtagtttgtttggaaattggtaaaatttatatattttatatgtgtttatatgtagttttattaagatttatgttaaattttggtgggataatttcgtggtatttttatataatttaaattatgttatgtaagagttattaaatttttatatattttagtatgaattttgtatattgtttaagattttgttaagagaatgtaaattaaatataaattggagtattagtgtaaaagtgatattttaaatgttttttattttgcgaggtttattttttagggattttgttataattttgaaagatttagttttatagtatatttgaaagtaggagtttttagaagtatggtttttgggataaa

SEQ ID NO: 720 - DNA, 5650 bp, Artificial Sequence
  chemically treated genomic DNA (Homo sapiens)
tttattttaagagttatatttttgaaaatttttatttttagatgtattgtaaaattaagttttttagaattatagtaaagtttttaaaaaataagtttcgtagagtgaggaatatttagaatgttatttttatattgatattttaatttatatttaatttatatttttttaataaggttttgggtaatgtataggatttatattgaagtatataagggtttagtgatttttatatggtataatttaaattatgtgaaagtgttacggaattattttattagagtttaatataggttttaatagaattatatataagtatatataaaatgtgtgggttttattaatttttagatagattgttttttataattaaattaatatttgtatttagttttatatattttagataagttgtgttaagaagtaatttagtttttttaaagtaaaatttagagtatgatttattgtaagagttataaaatattttttttattaaaatggttggaaaataataagtatttagtaaaattttttttattgtatgttttaaaggattaataaatgaaaatatagtataggtatgatatgaattaagattttaagaataaatattatatagtattaagaaaaatattgtaagtatattttattttaaatgagttagatttattatatataataattttaatttatgttttaggaaggtgggggtggggaatgaaaggtattttttttaagaaagaatatttaaacgatatatgtatttattttagtgaaattatatagatgttttgtaatttagaaaattatttttattaaatgtagttttaaaagtatatttttttttacgttttatttattaatatatttcgattaaagattacgtatgttataataaaaatttaattaatattatttatatttagaaagattataaataaggatttggtaatttatatttttttttttagaggaaagttgtattaatgttgtatgttttttataaagattaatgaattatttttaaattataatgtattaagttaaagttaggtaagtattttaaaagtaagttttattgttttagggtaaatttattatttttgtgtataattttaaattggttgtttttaaaaaaataggtttcggaaaaattatagtatagtttttattattaatttttaaggggttgttggattaagttgtttttttagaagatagttgtttttgcgttgtttagtataatggtttatatgtttaaattatttattacgtattaattttatgtaaatttatttaaattttataatttaatttgtatattaagaatgttgattttacgttatgaaaatttttttatgatttttaggatattttatattgttttattttatgttataaaattgatgtcgaagtaaaagtgttgaaattgattatttaataaagttataaaattaaaggtggaaaggaacgtggatagatttgaagtttattttttggttttaaggtgtaaattatttagtttatttttatagtttttaaagagatttaataatttgttttaataatttaattatatagttagatgagtttttttttattgtagcggtttaagtgttatttggaaatgtttggagattttattggttgttatattggaaggaggtgttattggtatttttttgatagaggatagggatgttgttgaatattttatagtgtataggatcgttttttataatagagaatttttttatttaaatgttagtaagtgtagaggttgagaaattttgttttaatggaagttaagtattgtttttagtaatggagtttatagtttttagatattttataaaggtggtttttatagttttaattagaaatttgtagttttaaaaagagagagatggattattattttaggtttttaattaaatgttgtaattataggtgatagtatagttggtgtttagcgtataaagcgtgaagttttagatatagggcggtagttatttgtggtaaggatagttaggtgatgttttttattatttggaaatttttttagttatttatcgttatgtaagtttgacgatttttttttaattattaattttttttttttttattttttattatggagttttttagtagaagttcgttgttttggttttttttttgtatgagtattaaaaataatatgaaaagttatttagaagatatgaaaatagtaaataatttaaggtgttttttattttggaaagtttatgatttaataggatttaaaaagggtttgtaaattaggtttggaatttgaaaagaaataggttgtttaaagaaatagttttatgaataaataaatatttaacgtaaaataattattaaaagaataggcgtagatatatgtatataattgtatagttatagttaagaacggaagaaaggaagttgaaattgagtgttattttttatgattgtattcgtaagaaaaatgtttatttagatgttaaaaagtagaatttatattttttattgtaattttaaaagattatagaattttaaaatttacgattttaaaaaaatttttaaataaattttaatgaaaagaaaatttaggtttgagaaattttatagattaatatggatttgattgataatttacggtttatttatatattaaatagttattaaatataatattgattagttagtggtatggatatatgtttatcgtattataaggtaagataggttgtaaataatatatatattatattattaattttgtataaaatgtaaataaatatatatatatgtgaatgaattgtaaaataaggaaagaaatacgtatatttatattaagagagataggaagatttgttaaacgttaataatggttatttgaagaggggaaggttatgtttaatttttgttttttttttgtgtttttttttattttttaattttttatagtgagaattttttgttatgttttgtatttataaaattaatatatttttatagatttaaattgtattgttttaggttttgtttataaaataaggaaaaaataaatttgaatatattaattttttaattaaagaaattatttttagaattaataaaagtaaatatttattgagtagtattattatgttttggtatttttttaagtatttaaaatgtattaatttattttaattaaattaaaatagatgtgttgagtaaaaagagttttggaattatagaaaatgtaaatgagttttagttttattgtgaattttgatttgtttttatagttcgaaatgagggggtttaataaaaatgatttttaaaggttattttaaggttaaattaagattttatatgtaaaaatttggttaataagtgttagttcggaagttttaagagtgatggggtagtttggattattttaaaaatatagaattttattaaaaaagaacgtatgatagtgtgttttagttttttttttttaatatatgtaaattttttattatgtttttttttaaaaggtttatatttttttaatatttggatataattgattaaatcgaggcgaagtgtgtattattgtaaaagaaattattgaagagttttatttgttgttaaaagtttcggttatttttaataaatttggagtaaataaaaatttaaatattttagtcgagttttggggtaaaaatgatttttttagtgtttggttaaagggatttaaggatttattgggatttagtaaaagacgttttacgttttaaatatatttaaaattttaatataatattaaaagaaaagtgaggggttagtacgaaatttttgttaggggaaattttagttgcgtagttaaggaaattaggatttttcggttaattatggggtttttgtcgtagtttatagttcgatataaagttataagttcggagggtcggtggtttacgcgtggatcgaaagaattacgaaggtttggggaatgatattgatttgttaggtttattttatgttttatttattattattaaaagaggtttattgatagttttattagtaaaattagtaatagagttgtacgtttgtaatatatatatacgcgcgcgtgcgtatatatatatatatattcgtgggtttatgggaatattgagggagataatttttaggttaaaattatataaaaattatttgggaaatataaagacgtaagatataaaataaatttggagtgtaaatgtgtaagatatatttagtgggaatataaaagagaaaagtatagcggtttgataattgggacggcgttcggttttacgtggggttttaggtggttttatcgtcgttcgtattcggttagtttttgtagttcgtacgcgtttttcgcggggcgcgcggttttttacggcgataaatcgaatttcgaatttcgtcgtagggattttacggtcgataaggaggagttcggcgtcgttatttattcgcggggttatcgattcggaggttcgcgtttcgtttcggggttttcggtacgttcgggatttttgagggggcgcgttcgtcgattcggttatttttgcggcgtcgggtttttagcgtgtcgtcgtcgtcgtcgtcgtcgcgtttttcggggggagggattagcgtttcggcgcgagtttagaggtcgtttattcgcgttattttttattcgcgttcgtcgcgttagcgttttagagtatcgagggtcgtcgtcgtcgtcgttgtttcgtcggtttcggcgttcgcggtcgcgtcgtcgttattttgattttagtcggaagtgacgtcgggcggcgaggtagtggtttgcggggttggggggtttcgggattttcggtttttttacgattttagagttcggtttttgattttgcgtcgtcgtttaatggttattatttagtcgtttttcgtaggttatcgcggattttatggcggcgtttcgggaaggaatttcggcggttggcgtcgcggtaagttcgatcgtattttagggttaggattttgcgtggtttaaagatttttaaagaattaaaaagattgaaggaggtgttgggggggtatgtttatcgttggaggttattaaatatttgataagtatataaacgtagattttatatttttacgtttggatttatattaaaaagatttaattttaggtagatagacgtagttgttgggtttatttgttgttttagtatttaggagtagtgattaacgttgttttgtgttcgcgatgttttagtgtagcgtttttgagagcgcggtagtagttttgtttttaaggagtttgttgtttttaagcgggtaaataaatggattgtagagacgacgatttatagatgttttgatgaagatgaattgggtggaattggagatggtttttcgatatttaagggtggaggtttagtacgtggttgaaaatgagttgagtcggggagaagtataggttggagatgagttggaaagttgggagttgtcgttatagatggtgtttggagtttttagtattttaagataaagtaattttttgagaatgaagttaggaagaattcgaatgtgatggttacgttggttatttgtagaaagtatttagtggaaaaataggatattaagggtaggtgtgtttttaaaa

SEQ ID NO: 721 - DNA, 2500 bp, Artificial Sequence
  chemically treated genomic DNA (Homo sapiens)
gatagtgtttttattattattaaaaaagtaattaattttaaattgtttttaaaaaagaaaacgtattttttattaaaattatttttatgatgattaataaaatataattaaattttagatttataatgtaaaaattttttaaataaaatagttaaggaaaagtgtaagtgaatagaaatagtgtgaatgcgtgtgtttggttataatagttggtaaaggtataagtgtttgtaggtgcggaggaggtcgtagtagttcggggtggttgagggttaagacgtgttgttagttatagggaaggaattttaggatattgtttgaagagttaggtttttttattcgggagtttgttttttacgcgtgttagttatattttataaaagaaaagagagattttgtattaatttagttgagagtagttacgtagtaaaacgtgagttatttagtgtttaatgtttggggttaaaaaatagaggaaagaagaaggattaaaagtaaattagtttatgtattatttgtaaaagtttttaaaatgtgttttgttttttatttgttatatttttgtaggtgatagacgagtgaggatatttagagaaatttaggaataaattaggtttatttattggcgtcgaggttagtttcgaagatagaaaaacgttttatttttgtttgtattgtggttgtttgtggttcggtcggggaggcggtcgggagtgaggtttgatcgtttttggcgtttttatttttttaggcgtagaaggcgtttacgaggatttttagtgttcgacgttgttacggtttgggattagaggtagggattagggagttaggaattgcgtcgttttcgtttttgttttggcgcgagggaagttttttttattcgggtttagttttgtaggggggcgcgtggggttagatcgtaaagcgaaggtgcgggtcggggtgggtttcgcggagataaaggtcgggtttgtttgtttttagagggttttagcgtttgttaagaggaagttttcgaggttcgggtagggaagggggtacgggttttttagggttcgtcggtcgtagtaggaagttggttagggtacggtcgtgagcggagcgggtagggtttttttaggagcgcgggcgaggtcggcgttggaggggcgaggatcgggtataagaagtttcgtggttttgttcgggtagtcgtaggtttttcgcgcgtttcgagttttcgcgttatgaagttcgtcgtttttttggggttttgcgtggttttgttttgtagtttcggtgagcgtttcgggtttttggcgcgtacggtggggtttgaggtttcggcgttcgttgcgttttcgtcgttgtttgcgtcgatcgtggattttaggtttttttagtttcgttcggcgtttagagggtttcgttatttcggggtttcgcgtttgtagttcgcggttttttttttttagggttgtttttagtttcgtgtcgggatggaggtcgtttttggtttggggatattcgtttgtttttcgtttggagatcggttttttattttgtaaggcgtagcgcgagtgtttttttttttgggggtttgtttcggattttgtatagagtttatcggttttttcgttatttttaggttatttcggtgattttgtagcgttttttggcggggtcgtttttttagattcgtttgtgtttcgggggttcgtatttggtaggtttcggcgtaggagggaggggcggtcggggagtcgggtagggcgcgacggtttttgggcgtttttcgcgggggcgcgttttggatttgttttttggggatttcggcgcgtaggcggtgatttttttttgttcgtttgtagttgttgtttttttagtgggttcggttaagtttgtggtttagtttgtcgttgcgttggagtcggcggcggaggtcggggtcgggattttggttaattttttcggtatttttaattcgttgaagtttttgttgagtagtttgggtattttcgtgaattattttatagagggtttttagaagtgtgtggttgagttgggtttttaggtcgtgggggtcgtgaaggttttgaaggttttgttggtaaagtgggtatttcgggtgttttttttgcgcgggtattttttttcggttagttttaaaattgtattagaggtgtttcggttttacgttagggttgtttttcgttttgtttttttaagttttgtttttgggagaagttcgggttttcgggtgggaattgggtggggcgtattcgagttgtaggggcggggaaggcggagatggtttcgcgcgggtgcgcgtttttcggagacgttagcggaatcgtttcgttttcgttttttatagagtcggtcgttgtcgcgttttcgtttgagtttttggtggtagggttgggggtatttaagttcggtttttgttttttagggggttttgatagtgtttggttgagtcgagattggagtatttatatttgaggataagacgttgttt

SEQ ID NO: 722 - DNA, 2500 bp, Artificial Sequence
  chemically treated genomic DNA (Homo sapiens)
gggtagcgttttgtttttaggtgtagatgttttagtttcggtttagttaaatattgttagggttttttggaaagtagaagtcgagtttgagtgtttttagttttgttattaagaatttaggcgggggcgcggtagcggtcggttttgtggggagcgggagcggggcggtttcgttggcgttttcgggggacgcgtattcgcgcggggttattttcgtttttttcgtttttgtagttcggatgcgttttatttagtttttattcggagattcgggttttttttagggatagggtttggaggggtaggacgggaaatagttttgacgtagggtcgggatatttttggtgtagttttgaggttggtcgggaagggatgttcgcgtaggaagggtattcggggtgtttattttattagtagggtttttagggtttttacggtttttacggtttggggatttagtttagttatatatttttgggagttttttatgaggtggtttacggggatgtttaggttgtttagtaggagttttagcgggttgagggtgtcgagggggttggttagggtttcggtttcggttttcgtcgtcgattttagcgtagcgataggttgggttataggtttggtcgagtttattaagaaagtagtagttgtaagcgaatagggaggggttatcgtttgcgcgtcggggtttttagaaggtaggtttaggacgcgttttcgcgggaggcgtttaggaatcgtcgcgttttgttcggtttttcgatcgttttttttttttgcgtcgaggtttgttaggtgcgagttttcgggatataggcgggtttggggaggcggtttcgttaggagacgttgtagggttatcggagtggtttgagggtggcggaaggatcggtgaattttgtgtagggttcgggataggtttttaagggaggggatattcgcgttgcgttttgtaggatgaggagtcggtttttagacggggggtagacgggtgtttttaggttaggggcggtttttatttcggtacgaggttggagatagttttgagagggggaggtcgcgggttgtaggcgcggggtttcggggtggcggagttttttgggcgtcgggcgaggttggaaggatttgggatttacgatcggcgtaggtagcggcgggggcgtagcgggcgtcgaggttttaggttttatcgtgcgcgttaggagttcggggcgtttatcggagttgtaggatagggttacgtagagttttaggagggcggcgagttttatggcgcgggggttcggggcgcgcggggaatttgcggttgttcgggtaaggttacgaggttttttatattcggttttcgtttttttagcgtcggtttcgttcgcgtttttgagaaagttttgttcgtttcgtttacggtcgtgttttggttaattttttgttgcggtcggcgggttttgggaagttcgtgtttttttttttgttcgggtttcgaggatttttttttggtaggcgttggggttttttgagagtaggtaggttcggtttttgttttcgcgaggtttatttcggttcgtattttcgttttgcggtttgattttacgcgtttttttgtagggttgggttcgggtgaggggagtttttttcgcgttagggtaggggcgggggcggcgtagtttttggttttttggtttttgtttttgattttagatcgtggtaacgtcgggtattgggggttttcgtgggcgttttttgcgtttggggaggtggaggcgttagggacgattaggttttattttcggtcgttttttcggtcgggttataggtagttatagtgtaaatagaagtggggcgtttttttgttttcgaaattagtttcgacgttagtggatgggtttggtttgtttttgagtttttttaaatgtttttattcgtttgttatttgtagaagtatgatagatggagagtaaagtatattttgaaaatttttgtaaatgatatataaattaatttgtttttagtttttttttttttttttattttttgattttaggtattgagtattgagtgatttacgttttgttgcgtggttgtttttagttaggttggtgtaaagtttttttttttttttgtaaagtgtagttggtacgcgtgggaaataggttttcgggtgggaggatttgattttttaggtagtgttttggaattttttttttatggttgatagtacgttttagtttttagttatttcgagttattgcggtttttttcgtatttgtagatatttgtgtttttgttaattgttgtggttaggtatacgtatttatattgtttttgtttatttatatttttttttgattattttgtttgggggatttttgtattataaatttggagtttggttgtgttttgttggttattatggaagtaattttaatgggaaatacgtttttttttttaaaaatagtttgaagttaattatttttttggtggtggtaaagatattgtt

SEQ ID NO: 723 - DNA, 2001 bp, Artificial Sequence
  chemically treated genomic DNA (Homo sapiens)
gtattacggtggtcgtttttttttgttttgtgtagtggattttttggtttttttttagttttggggtttttatagttttcggtttggtttttttttttatagttaggttttgggtaattttaggggaaagtgattttgaggttttttattttttttcgtgttttgtataggttttgggttttcggcggtgttgtttgtcgtagttttacgtttttttgggagagtggtttaggtttttttttttgagtgtgattgcgttgtcgtttgcgaggtttgcgcgggtttttttcgggttgtttttgttgggatggggattggtggtttcgggttacgttttggattcggtttgttttttggtataagttcgtacgggttacggttaggtaggagggcgggcggcggggtttcgggggcgtcgagttcggggtcgtgcggtttttaagagtaggttgtgcgtgtttttgttggagttttacgaaggcggtttagggttatttttgagggcgcgtgggttcgattcgcgtttcggatttagtttgcggttaggaatgtaggtgttttagggtgttaaaaggaaaacgtataaggtttcgtcgaggagggggggttaggaggggatcgggggtgggaagaacgcgggggagagggatggtagggtgttcgttcgagggatcgatattttcgcgagtggtattttaggatgttgacgtcggcgggggtgggggttcgaggggcggtcggggttagggggcggttttaggggtagggtcgtagtacgaggggtcgcgtgatttcggcggtgatcgggtggggagaggtcggcgtcggggttgggagacggtcgtgggtgggagggtgtttcgtggggacgtttttgtcgtagcgttcggttacgcgcgaggtttcgtttttaggacgcgttcggcgggacggattcgtttatttcgtagtcgcgcgttcgtcgcgtcgttttgtgggcgttgtagtttcggagttcgcgtgcgcggggtcgggttcgggagttttagggtagtcgtttcgtcgagtcgtaggtatcggtggggaacggggttacggggtcgcgtgtcgggggttgcggggtgtttcggggttttggggtgagtgcggggcgcgggtcgaggtttgtagggttttgtgaggtgagtgtgggggttggcgttggggttcgcggggttttggggagggtgcggggcgtgggtcggggtttgcggtttgtagtttggggttcgcggggttttggggagggtgcggggcgtgggtcggggtttgcggtttgtagtttggggtttggggggttttggggagggtgcggggcgtggtcggggtttgcggtttgtagtttggggtttggggggttttggggagggtgcggggcgtgggtcggggttttcgcgggggtcgcggtggttcgggcgtttggtagaatcgttgttgtgtagcgggtttttcgtcgttcgtttttcgtcgtagtttgcgaatggggtggggagtttcggtttttagtttgtttttcgcgttattttggggcgttaagttttattttcgggtttggaggaaagcgtggattcggcgttcgcgtttaggtacgtgttgtttcgggacgggttagtcggtgggtgaattttgttagttacgcgtggggcgggtttttggtatatttttagattattgttttttgtgttagaagttttgtaggtgtaatttttttttggagtagttgtgggtgcggatttagcggagtaatttcgaggcgttttagagagagtttggatagtcgttggagtttttttcgagtgggtttttttaatatcgttatagtaggaaagttatttttttagggttttgtttatcggaaatttttgttttggggagtttggtttgtttggttttaggatataggttaattaagttggtttcgaaatttagaatgtatttagagggaaggtgggataaagtttttggaggcgtttgttggtcgtt

SEQ ID NO: 724 - DNA, 2001 bp, Artificial Sequence
  chemically treated genomic DNA (Homo sapiens)
ggcggttaataggcgtttttaaggattttattttattttttttttggatgtattttggatttcggggttagtttagttggtttgtgttttgaggttaggtaggttagattttttaggataggagttttcgatggataggattttagggggatggtttttttgttgtagcggtgttggaaggatttattcgggaaaggttttagcggttgtttaggttttttttgagacgtttcgggattgtttcgttggattcgtatttatagttgttttaaggggaagttgtatttataaagtttttggtataggagataatggtttggagatgtgttaggggttcgttttacgcgtggttggtagggtttatttatcggttggttcgtttcgaagtaatacgtgtttgggcgcgaacgtcggatttacgtttttttttagattcgggggtgggatttggcgttttaggatgacgcggagggtaggttgggggtcgggattttttattttattcgtaggttgcggcggaaagcgagcggcgggaaattcgttgtatagtaacggttttgttaggcgttcgggttatcgcgattttcgcggagatttcggtttacgtttcgtattttttttagggttttttagattttaggttgtagatcgtagatttcggttacgtttcgtattttttttagggttttttagattttaggttgtagatcgtagatttcggtttacgtttcgtattttttttagggtttcgcggattttaggttgtagatcgtagatttcggtttacgtttcgtattttttttagggtttcgcggattttagcgttagtttttatatttattttatagggttttgtaaatttcggttcgcgtttcgtatttattttagggtttcgagatatttcgtagttttcgatacgcggtttcgtggtttcgttttttatcggtatttgcgattcggcggggcggttgttttggggttttcggattcggtttcgcgtacgcggatttcgggattatagcgtttataaggcggcgcggcgggcgcgcggttgcggggtgggcgggttcgtttcgtcgaacgcgttttgagggcggggtttcgcgcgtggtcgggcgttgcggtaggagcgtttttacggggtatttttttatttacggtcgttttttagtttcggcgtcggtttttttttattcggttatcgtcggggttacgcggtttttcgtgttgcggttttatttttggggtcgttttttgatttcgatcgtttttcgggtttttattttcgtcggcgttagtattttggggtgttattcgcggaggtgtcggtttttcgggcgggtattttgttatttttttttttcgcgttttttttattttcggtttttttttgatttttttttttcgacgaggttttgtgcgttttttttttggtattttggaatatttgtatttttggtcgtaagttggattcgggacgcgggtcgggtttacgcgtttttaggggtggttttgggtcgttttcgtggggttttaatagggatacgtatagtttgtttttggggatcgtacggtttcgaattcggcgttttcgggatttcgtcgttcgtttttttgtttgatcgtgattcgtacgggtttgtattaaggagtaagtcggatttaggacgtggttcggggttattagtttttattttagtagggatagttcgggggagattcgcgtaggtttcgtagacggtagcgtagttatatttaggaaggggggtttgggttatttttttaggaaggcgtggggttgcggtagatagtatcgtcgaaagtttaaggtttgtgtaggatacggggagaagtggggggttttagggttatttttttttggagttatttagggtttggttatggggagggaagttaagtcgagggttgtgggggttttaaggttaaggaggagttaggaagtttattgtatagaatagaaggggacggttatcgtggtat

SEQ ID NO: 725 - DNA, 934 bp, Artificial Sequence
  chemically treated genomic DNA (Homo sapiens)
tgttgttgttattgtaaagatgttgttaaggataaaagtttatgtagatgtttcgggtttgggtaattttatttttgcgtattgtttttttagatttttaagtttttttttttattttttataattttatttagggtttagagtaggtgattgtagcgatttggttttaataaaatcgaaagtaaacgttttttgtgaaaagtttcgggttgtaaattagaaatgtttatgttgattttttattgtatggaaaaagtttttgggcgaaatagttttgagttcgagaacgatttaaaaagttggagttgtgtatatagttttgagcgtttgaagttgtttaattattgtgtgattagaaagaagagtgacgcggtaggaagaagaagtcgggttttggggagagcggaggcgggttagggtgggtaaaggtagtcgatgttaggaatataatcgtttttcgcgtcgttttaaattaagagatggtagcggttttttagcgtattgttggaagtgtgttttagtagatagggtgtgggtaagatgcgcgggtagatagttcgtattcgttatatgtgttggggtgcgagatttagatttgcgttatttcggtttttattttttattttttgtttttgttcgtaacgtttagagattgtttttttttttttatatttacggttttgttatttgaaggaaagggttggttggttagtatttatcgaataaagattgggcgtcgtaggtagtattaaaattaagattatttgagaaatttagagaaaatcgagggatagcgatgggtttagggttggataaggaataatgagttttttttttttttttttatagacgttttttttacgcgggaattcggttttttttttttcgacgtagagagagaagcgattttataggtggaaaatttgagatcggt

SEQ ID NO: 726 - DNA, 934 bp, Artificial Sequence
  chemically treated genomic DNA (Homo sapiens)
gtcggttttagattttttatttgtggaatcgtttttttttttgcgtcggaagaaggaggatcgggttttcgcgtgaaggaggcgtttgtggggagggaggagaagggtttattattttttatttagttttagatttatcgttgtttttcggttttttttaagttttttaaatagttttaattttggtgttgtttacgacgtttagtttttgttcggtagatgttggttaattagtttttttttttaaatgatagggtcgtggatgtaaaagaggaaaaatagtttttgagcgttacgaatagagatagggaatggggaatgaaagtcgagatggcgtagatttagatttcgtattttagtatatgtggcgagtgcggattgtttgttcgcgtattttgtttatattttgtttattggagtatatttttagtagtgcgttgggaaatcgttgttattttttagtttggaacggcgcgaagggcggttgtatttttggtatcggttgtttttgtttattttgattcgttttcgttttttttaagattcggttttttttttttgtcgcgttatttttttttttggttatataatggttaaataattttaaacgtttagagttgtgtatatagttttagttttttaaatcgttttcgggtttaaagttgtttcgtttaggagttttttttatataatgggaaattagtataaatatttttaatttatagttcgggattttttataggagacgtttattttcgattttattggaattaaatcgttgtagttatttgttttgagttttgaatggaattgtgagaaatggagggggaagtttaggggtttggggaagtagtgcgtaggaataagattgtttaaattcgaagtatttgtatgggtttttatttttggtaatatttttgtaataataatagta

SEQ ID NO: 727 - DNA, 2001 bp, Artificial Sequence
  chemically treated genomic DNA (Homo sapiens)
gatttgggtgtaggatattttttaaatagttttttattttatttatgaaataggttagttttggtttagtaaatttgttgtgtaatgattttttaatgagttaggttggttttaagtttttggttatttcgttgtaattagttaggttttgttttttgaagggttatttgggattgtcgtgtagtagatttttttttaacgttttagaattaggtgttttttttgattttgtgtggttttattgaattaaatttagtaagttatagaggtttttagatttttaagatataatatttaaaggtgaggtaggttgtgaaaagtttagcggtttttggttgtttttgaacgcgattatttgtaggttggttttgagaattcggttagagttgcgttaggaaaacggttttcgggaagttttttagagagtagaatgaggaggtggattttgtgtgaaggaatattttgtgtggttttggtggttaggaaagagttggtataagttgaaagaaggtttgtggcgaagcggagggggatttaagttagggatttttatttgtttttaggaaggatgaaaaggagataaaaattttaaagggaaaagttttttaggttgtaggttaatgagcggcgggaaggaggagtgaggttggggaattttttttagagttagttagagcggacggttgttgggaagttaattagcgcgttcgagtttgtagtttttttgtagtagttatgttagagcgttttgtgtagagcggttgcgagcgggtagttgggttcggttgtcgggagttatcgcgcgggtttcgtatttttttttcgtattgttttcgttcggttttcgcgtcgcggtgttttagtggttttcgtcgcgttttacgtcgcgttttcgtatttcgtcggttatcggtcgtataatcgttatcgttttttggtcgcgcggttcgtttcgtttcgtttcgttttttttcgtttcgttttattttagttagtttcgttttgtttcgcgtcgttaagcggttttcgttttcgtttagcgtttaggtagttgcgaggaaatttttgtagcggttgggtagtagtacgttttttgttttttagggttattgttaggtttgtcgagttttgggattgttttcgtttcggttgttattttttcgcgtttttttagttttttgcgaagtaggatggtcgggatcgtgcgtatcgcgtgtttggtggtggcgatgttgtttagtttggatttttcgggataggcgtagttttcgtcgtcgtcgtcggacgttatttgttattaagttcgtttttttttttagagattgtagttcggatttaagtgggtgttagaaattttcgtgttaggtgaggaggggttttttgagcgtgtttagcgtttagcggggagtaaggcgcgcgtggtggttgtattttgagcgcgttagtttcgtcgggttgtagtcgtgcgttttgtagttgggtatttgggagtggtcggtgtgtttggggtttggttgggtttattgagggagggagagagggtgtgtgtggacggagtttatattttttagttttacgttgttgttagggaaggtgtgagcgggaggaatcgtggggatcgttttttcgtgagcgttcgttttttggaagggcgagaaggtgggagttattttttcgggtttttgcgaattggcgttttatagtcgagttggtgttttatgaatttgttatttttgttcgtatatacgtgttagaattttagttttagttggattatagttttagttattttttttttaacgtatttttatttttcgtcgtttttatttagtttgggttttttaagtttacgggtttaagtgtaagtaaagttgaggatagatttttgagtttgtagtggcgggtgaagatatattgaggtaaatttttgagtaagagggtttttaaaatgaggagattgaatttttttttttaaaatagtattttttatataggttagcg

SEQ ID NO: 728 - DNA, 2001 bp, Artificial Sequence
  chemically treated genomic DNA (Homo sapiens)
cgttaatttatataagggatgttgttttgaaggaaaaggtttagtttttttattttggggatttttttatttaaaagtttgttttagtgtgtttttattcgttattgtagatttagaaatttgtttttaattttgtttgtatttgggttcgtgagtttaggaaatttaggttgggtaaaggcggcggggggtgggggtacgttggggaagggatggttggagttgtggtttagttaaggttgaaattttgatacgtatgtgcgagtaaggatggtaaatttatgaggtattagttcggttgtggggcgttagttcgtagagattcgggaaaatagtttttattttttcgtttttttaaaaaacgggcgtttacgagaaggcgatttttacggtttttttcgtttatattttttttgatagtagcgtgagattgggggatgtgggtttcgtttatatatatttttttttttttttttagtagatttagttaggttttaggtatatcgattatttttaagtgtttagttgtagggcgtacgattatagttcggcggggttagcgcgtttagggtatagttattacgcgcgttttgtttttcgttgggcgttaggtacgtttaagggatttttttttatttggtacgggagtttttggtatttatttgagttcgggttgtagtttttggaagaaggagcggatttggtgataggtggcgttcggcggcggcggcgggggttgcgtttgtttcgggaagtttaagttgagtagtatcgttattattaagtacgcggtgcgtacggtttcggttattttgtttcgtagggagttaggagagcgcgggagagtggtagtcggagcgagagtagttttaggattcggtaagtttggtagtggttttgaggagtaagagacgtgttgttatttagtcgttgtaaaagttttttcgtagttatttgggcgttgggcgagggcgggaatcgtttggcggcgcggggtagggcggggttgattggggtggggcggggcgaggagggacggggcggggcgaggcgagtcgcgcggttagggggcggtggcggttgtgcggtcggtagtcggcggggtgcgggggcgcggcgtggagcgcggcgggggttattggggtatcgcggcgcggggatcgggcgaaggtagtgcgagaggagggtgcggagttcgcgcggtggttttcggtagtcgagtttagttgttcgttcgtagtcgttttatatagggcgttttggtataattattgtagaggggttgtaggttcgagcgcgttgattggttttttagtagtcgttcgttttgattggttttgggagaagttttttagttttatttttttttttcgtcgtttattggtttatagtttggagggtttttttttttaggatttttgttttttttttattttttttgggggtaggtgggggtttttgatttaggttttttttcgtttcgttataggtttttttttagtttgtgttagtttttttttggttattagagttatataaggtgtttttttatataaaatttatttttttattttattttttgaggagtttttcgggaatcgtttttttaacgtagttttgatcgggtttttaaagttaatttgtaaatagtcgcgtttagggatagttagggatcgttgggttttttatagtttgttttatttttgaatattgtattttaaaagtttgaaagtttttgtggtttgttagatttgatttagtagagttatataaagttagagaaagtatttgattttggggcgttaaaagaaaatttattgtacgatagttttaggtggttttttaagaggtaaagtttaattggttataacgaaataattaggggtttaaagttagtttaatttattagaaaattattatatagtaaatttattgagttaaagttagtttattttatagatggagtagaaggttatttgaaaggtattttatatttaaatt

SEQ ID NO: 729 - DNA, 6435 bp, Artificial Sequence
  chemically treated genomic DNA (Homo sapiens)
atttttttttttatttttttatagtttttgaatttgtgggatagattgtggtagtaatggtaaattgatttgtaattagttttaggtgtatatatatatatatatagtttgttatatttttttagttatagttatttgttttttttagtttttgttgtagttttttatgtttgtttttgtatatataattgtatttttttgtatttttggttttggttattggtttggttttttagttatttttttttgtataattaagtttgtatttatatagttttatagttttagttgatattatagttttaagtaaatagttttgtatattatttattttttaaatgttgagttgtttatagtgaggtttgttatttatataatttttgttataatttttgataatttttattgtagttttatgtttatgtagttttttatatgtggttttggttatttagtttgttttgtttgttattaaatagtgatagggttgtagtttttgttttttttttgtagatattattttgtgtatattattataggtttttgtatagtattttgattatttatttaggtttagttattttttgaaatatagttataattttttatatagatatattattaaaagtttgtggttataatttttgtatatttttatatataattatagttttttatgtttttgatatatatatggttattgatatgtagtttttattattgttttttatatatgttattatattgttttttttataattgatttttgttttatattttttatatatagttatgtgtgttatgtttagttagttttgataatattagagaaaaagtgttagtagtttttagtattattttgaaaaatatatatttataggaataattttttattttttgggattttttagaaaaaaaaaaggtttattttggggaagtaaaataaatagtggagatgagtgtagtattgttttttaaattattaatttttaggttttaaggtttgggttgggttagtgttaataggtgagtttaggagttttttgaatttatttttttttgtttagaatagagataggataggttttatgttttttattttttttttttaattttagggatattgaaagggttttttgtatttgtttgtaggaaattggggggttgggagggagggaattgaaaatttatgtttggtattaaaaataaatatttggagtgggggaggtggtaggaagatttttttttaaatttttttttttttatttattttattaaatataggaagagatgatttttttttttttattgaaaagttttatttaaaaatagattatattattaaaatggtagtgggggagagatagggagatttggagtattggttggaggggttttttagatggggattattttttaaaaaaattttttattgggaggaaataggtaggattttagggaggttggtagataaaggaatggttttttagggggaagaataaaagggatatttttttttggttaaaaagttggttgaaaaggataagttgtttgagagaaaggttggggaggtggaaatttttattttaagggtgtgatttttttttggttaagatttttaatttattaaatggtataaattttttttggatttttgagtatggttaggaataataaaataaaataaattaatttttttatttatatttaaaaatgtagatagggtttttttatttttttaagggtaggttgagaaataaagaaagaaaggttgtttttaagttagattttgattgttttgttttggggaaaaaagtggggaggtgggggagatgttttaattattttaaaaggttaggttaggttttttttagtggtttttaaaaaataaataaataaattgtttttattattgaagtaggagatgtgtaagggtggttattgggggattgatagaaaatagagaagttgtggaagttgtgtgttttttgtggaggagataatgagagttatttttgggagtaattttttttaaggatttttattttattataattagagtatgagttttttagttgaattatgtttttttttgagatggttggttggagagagtatggatggagtgattttagaaggggtggtggtggtggtggtagtagttatggtttttggggttttggggagagtattatgggggttgagaggttatttatgttgatagaagggatgtgtatttgggtgttgttattggatggaaattgggggtaaaaagagggagaggttatagatgggggttatttttgggttttttattttgtttaaaatggggaaagaggattttatttggaaggagagtttggttgggttatggggtgtaatgggatttagggtgttttagaagtgaatgttaggaggtagtgagttgggtgttagtagtattggggtttgtggggagagggtggttggagtttaagtgagtagaaagtagatgtgggatgttggaagggatttggttttggttttattatagattttttatttatatttttagggttattttttaaagtgtatatatttagatggtaattatggaggttatgtttatgattttttaaattttgtagatattttttattttttatttttgagagtttatttttagttgttgagattttattggttaagattatttataagattttatttaaatgttgtttttaaattttttaagttattattttaatagtttagggttaatttttaatttatgttttatttatgaaattttatatgtatattttagattaaaaagttttgtttaggttttttaagttatattttaatttagaaatagttttatagaaagatttttggttttatttataaaagtttttagttttgttttttattaattaaattttatttttttagttagtattagtttagttaattatatttaaaggttttattttttttaggaataattatatttatttttttttgatttttgttagttatttgttatatgttaattttattggtgttggtgtttatatattttatttttttgtaggtatttattaatgtatgtgtaggaagtagggatggggttagtgttggttttggagtttggaggttggagttattttttgattttggggtttgtttgggttttggtttatttagtaggtttgggttgagtggaagttttaggttttggggtttttggtttttttgtggttgggagattttagggttggaagttgtatggttgtttgtttgttttgtggtgtttataataattgtgggtagttgggttggtatgtttttttgtggagggatttttggtttggttttggtggtttttggtataaatttttttttttttgtaatttttaatttttttttgggtttttttatttttatttttgggggtaaagtttggtttaaatttggttttatattaagtttttttgattttaggtttggggttttgggtggggttaggatgatttggtagaggagtaggtataaagagggtgtgtaaggattgttgggattataggatttttttgtgggttatttagtgatttttttgggaaggtggtatttggtatttagggtatgattgtatattagagtaagttttttaataggatataggattttgttaaggaagtagggttttttttggggtaggtttttttatgggataggggatttggggtgagataatttgaagtgggtaggaatttgagggatattatttttatttattaaaatagtggtttttaaaaatttatttttttttggattagtaatatttgttttatttggtaataagttaaaaatgtaaattattgggtttttttttagttttataaatttagaaattttgggggtgtgtttggtaatttgtggtttaataagatttataggtgattttgatgagtattagagtgtgagaattagtgtattaaatatattttaggtatttatatgtttggtagttattaattgtagtatagtatttttttttttttgttttaggatttgtgtagttttttgttttatttttttttttaagaggatgttttttttttattattattttttttaatgggatagttatgttttttttattagttttttttgttatttggggattatatattttttttttttattgtttttttttattgaatttttatattttagtttttatttgtagaggtaagttggtttttttagtttttagataggtttttaaggggtttggattggtgtttttgttttttgaggggggtgttgttgtttttgtaggagttgtattggggagtattatagtaggttgaggatgagggggtggttgtggttgtagagattggatggtgaaggtggaatagaggtttgagtgtatgtatttgttttggttgttgtgtgttaaattgtttgggtttgttatttttgtatttttgggtgtgtttggttttttagagatagtgttttttggggtggtatgtatagtagtaggggttatatttggtatggtggaggtaatagatatttttggttggggtgggtagtttttagtggagtattttgtgattttagggtaggatataaatttgtagatgaatttttggttgtttattttgtggatgatgttttaggaagggaggagaggaatagagggttttagaggaaaggggtaggttggaggtagggtgttaggggggaggaggggggtggagtggtatttttttttttttagtggttttttttttatttgtttttttttggtttttttgttttttttttgtaagttttttttttagtttatttttttttttattggtttttatttttttttttttttgttagattttttttatttatatttttttttagtttttttttttttttttttttttttataataattttttttttaagtttttttttatttatttttttttaagtttttttttgttattttttaggtttgtttatttgatttttttattttttttatattgtagtttttttttataatggggtttatgaagggtagtaggtgtgggagtaggttttttttttggttttaagaattagaggtttatagggttaggttttgtgggtgattgttaggatatagttttggagattagtaaatgtaataagataagaaaatgaagtaattgatataaatgttggaagaaagtaaattaatgtagatggatggggtgatgaattattaatatagaggattatttgaagttaatgatatagaagtggaatagggtaaggttattgtagaggagagggtgaggaggttttattattaatattattgtggaggttgaagttaaaatggtaagaaaatgaagtaattaatagtaattagataagaatattaaaaatattggtataaatattgggagggggtttatattaaggttggttttgttgggttatagagtatgtttggggttttttaggtttggtgggttttagagatgatttagtgtttttagagggtagagtgagatagttttattattaatattgttttggagggttgagtttaaggaataaaatatgaaaatggaataaatgttataaattatgaagggtgtgtagtatatgattagggtagttttgggagtgtggaggtattagggtattttgtggaagttttagtgttggttagatatgttatagggtgggtttgtgttttttggaagaggaataaaaagggatatttatgaatattgtttgggaaattttagtagaaggattaagaaaatgaaataattggtataaatattggggggaggagaaatttagtagtggtttgggggtttgagagggtaggatgggggaaattttaaattttagttgtaggaataagataatgaaaataattgatataaatattggggtagattagtgtttttttgggaatttaagaagatagtgtgtggaagttggtattaaatatgttgttttagaggttttagtttaaggaataagagaagaaaataattagttaaaaatgttgggagttttagaggatgaagtaagtaaaagttggtataatattgttagggaggttttgattttaggaatatgaaatattttggaataagagaagattatgaaataattagggaagtttagtattggtttaggggttttagaggatagaatgaggattagttattattaattgtgtttttaagatgttggttataggaatatggtaggaaaatgaaatgttgtgtatggtagggtagtattattttggggattttagagtgggagtagaaagagttagtattaataatgtagtggtggtttttgttaaagtagtaagataagaaagtaggtgagatagtgtttaggggtttaatattggttttagggtat

SEQ ID NO: 730 - DNA, 6435 bp, Artificial Sequence
  chemically treated genomic DNA (Homo sapiens)
gtattttaagattagtattgggtttttaaatattattttatttatttttttgttttattgttttggtgaaaattattattgtattattaatattgattttttttatttttattttgagatttttaaagtgatgttgttttgttatgtataatgttttatttttttgttgtatttttatagttaatattttgaaaatatggttaataatggttggtttttattttgttttttgaaatttttggattagtgttgggtttttttagttattttatagtttttttttattttagaatattttatatttttagaattaaaatttttttgatagtattatattaatttttgtttattttgttttttgggatttttaatatttttaattaattattttttttttttattttttaagttaaaatttttgaaataatatgtttaatgttaatttttatatattgtttttttaaatttttagaggagtattggtttattttaatatttatattaattgtttttattattttatttttatagttaaaatttaaaattttttttattttgtttttttagatttttaggttattgttgggttttttttttttttaatatttatattagttattttatttttttaatttttttattgaaattttttaaataatatttatgaatatttttttttattttttttttgagaaatataggtttattttgtgatatatttgattagtattaagatttttatagaatgttttagtgtttttatatttttagaattgttttggttatatgttgtatattttttatagtttatggtatttattttatttttatattttattttttgagtttaattttttagaataatattagtaatgaggttattttattttgttttttgggaatattaggttatttttgagatttattagatttgaaaaattttaaatatgttttgtgatttagtaaagttagttttgatataggtttttttttaatatttatattagtatttttaatatttttgtttaattgttgttagttattttatttttttattattttagttttaatttttatagtggtattaataatgaggtttttttatttttttttttgtagtgattttgttttgttttatttttgtattattagttttaaataattttttgtattaataatttattattttatttatttatattaatttatttttttttaatatttatattagttattttatttttttgttttattgtatttgttagtttttaaaattgtgttttgatagttatttataaggtttggttttgtgaatttttggtttttggagttaggaagaagatttgtttttatatttattgttttttatgggttttattgtgaagaggagttatagtgtggagggagtgggaaaattagatagatggatttggagagtgataaagggaggtttggaaaggggtggatgggaaggggtttaaagaaaaaattattgtggagagaagagagaaaggggaggaattggggagggatatagataaggggaatttggtgggagaggaaagaggtagaaattaatgggagaggaaatgggttgagagagaaatttatagaggagggatgggaaagttggagaggagtaagtgggaagaaagttattaggagaagagaaatgttattttatttttttttttttttttgatattttgtttttagtttgttttttttttttaaggttttttgttttttttttttttttttagaatattatttgtaaggtgagtggttagaagtttgtttataagtttgtgttttattttgaggttgtagggtgttttattgaggattgtttgttttagttagaggtgtttgttatttttattatgttaaatgtggtttttgttgttatatatgttgttttaggggatattgtttttggaaagttaggtatatttaagggtgtaggaatggtaggtttaggtggtttggtatgtagtagttggaatgagtatatgtgtttgggtttttattttatttttattatttagtttttgtagttgtagttatttttttatttttggtttgttgtggtgttttttagtgtagtttttgtaggggtagtagtgttttttttggggagtaggagtattagtttaagttttttggaggtttgtttggaggttgaagaggttggtttgtttttgtaggtaaggattggaatatagaaatttagtaagaggaggtagtaaagaggagggatgtgtaatttttggatgatgagggaggttggtagaagagatatagttgttttgttaaaggagataatggtggaaggaagatatttttttagaaggaggggtggggtagagagttatataaattttgagatagaaaggggagaatattgtgttatagttagtagttgttgaatatgtaggtgtttggaatatgtttaatgtattggtttttgtattttagtgtttattagaattatttgtaggttttgttaaattatagattgttaggtatatttttagagtttttgaatttgtggggttggggaggggtttaataatttgtatttttaatttgttattaaatgaggtagatattgttggtttagaggaaggtaaatttttgagaattattgttttaatgaatgaggatggtattttttagatttttatttgttttaggttgttttattttaagttttttgttttataggaggatttgttttagaggaagttttatttttttgatgaagttttatgttttgttggaggatttgttttgatgtgtagttatgttttgagtattaagtgttatttttttggggaaattattgggtggtttataggagaattttgtggttttaataatttttatatattttttttgtgtttgtttttttattaggttattttgattttgtttgaggttttaaatttgaaattggaagagtttaatgtggagttgggtttgggttgggttttgtttttagaagtgaaagtagaagggtttaaggaagagttggaagttgtgggggagagagggtttgtgttagaaattattaaggttgagttagaagtttttttataggagggtgtgttagtttggttgtttgtggttgttatggatattgtagggtaggtgggtggttatgtggtttttagttttgagattttttagttgtagaagggttggaagttttgggatttagagtttttatttagtttgagtttgttaggtgggttgggatttgaatggattttaggattgggaagtggttttggtttttaggttttggggttggtgttgattttatttttgttttttatgtatatattggtgagtgtttgtggaggggtggggtgtgtgggtgttagtattaatgggattggtatgtggtgggtgattgataggaattagaggagggtgagtgtggttgtttttgaagagggtggagtttttgagtgtgattgattgggttgatgttggttggagggatggggtttgattagtgaagggtagggttggggatttttgtgggtgggattgagggtttttttgtgggattgtttttaggttggggtgtggtttaaggaatttgagtagggttttttggtttgggatgtgtatatggggttttatgggtgggatatgagttggaagttgattttgagttgttgggatggtgatttgagaggtttgagagtagtatttggatagggttttgtgggtggttttgattaatgaggttttagtaattgagggtgggtttttgggagtggggagtggggggtgtttgtagagtttgagagattataggtatggtttttatggttattatttaggtgtgtgtattttggggagtgattttgggagtgtgagtgggaaatttgtggtggggttgggattaagttttttttagtattttatatttattttttatttatttgagttttgattattttttttttatagattttggtgttgttgatatttagtttgttgttttttagtatttatttttggagtattttgagttttattgtgttttgtagtttggttaagttttttttttaggtaggattttttttttttgttttggatagggtgagagatttaagaatggtttttatttgtgatttttttttttttttgtttttagtttttatttagtggtagtgtttaggtgtatattttttttattagtgtggatggttttttgatttttgtggtgttttttttagggttttagaagttatgattattattattattattattattttttttggggttattttatttatgttttttttagttagttattttaaggagaaatatagtttaattgaaagatttatgttttgattgtggtggggtggggatttttgggaagaattatttttaagagtaatttttattattttttttatagaaaatatatagtttttataatttttttgttttttgttagttttttagtggttgtttttatatgttttttattttaatggtaggggtggtttatttatttattttttgaaggttattgggaggagtttgatttaattttttagggtggttaggatattttttttatttttttatttttttttttaagataagataattgaggtttggtttgagaatgatttttttttttttattttttagtttgtttttggggagatgagggagttttgtttgtgtttttggatgtgagtagaagagttagtttgttttgttttattatttttggttatatttaggggtttaggaagaatttgtattatttaatgggttgggagttttggttaaggaagaattatatttttggaatagaaatttttatttttttaattttttttttagatagtttattttttttaattaattttttggttagggaggaatgttttttttgtttttttttttgagaagttatttttttgtttgttaatttttttggggttttgtttgtttttttttaatggagggtttttttggggggtggtttttgtttggggggtttttttagttagtattttaggtttttttgttttttttttgttgttattttgatagtataatttatttttaaatggggttttttaataggggagagggagttatttttttttatatttggtggggtgggtgggaaggaagggatttgggggggaatttttttgttgttttttttattttaagtgtttatttttgatattaaatatgaatttttagtttttttttttttagttttttaattttttgtgggtgggtataaaggatttttttaatgtttttggagttgggagggaggaatgggggatataaagtttgttttgtttttattttaggtaagagagagtgggtttaaaagatttttgggtttatttgttagtgttggtttagtttaggttttgggatttgggggttggtgatttgggggatagtgttatatttgtttttattgtttgttttatttttttaaaatggattttttttttttttaaagagttttagagaatggggaattgtttttgtaaatatatattttttaaagtgatgttggaggttgttggtattttttttttgatgttgttaggattagttgagtgtgatatgtatgattgtgtgtggagggtgtgaggtagaggttgattgtgagagaaatggtgtgatggtgtgtgtgagaaataatagtagggattgtatattggtaattatgtgtgtgttagagatgtggaaagttgtgattgtgtgtgagagtgtgtagaagttgtgattatagatttttgatggtgtgtttatgtgggaaattgtggttgtgttttagaaaataattgagtttggatgaatagttaaggtattgtataagaatttgtgatggtatgtataaaataatgtttatgagaagggaatggggattgtagttttgttattgtttgatggtgagtaagatagattgggtgattaaaattatatgtgagagattatgtgggtatgaaattatagtagaggttgttagggattgtggtaaagattgtgtaggtgataaattttattgtaggtgatttaatgtttgagaaatagatgatgtgtaaaattgtttatttgaggttgtagtgttagttaaagttgtaagattgtatgggtgtgaatttgattgtatgggagagaatggttgggagattaaattagtgattgagattaaagatataagaaggtgtaattgtgtgtatgaaagtaggtgtgagagattgtagtaaagattgagaaaaatgaatggttgtgattgggagagtgtgataggttgtgtgtgtgtgtgtgtatatttgaaattagttgtaaattgatttattattattattatagtttattttataggtttagggattgtgagaaagtaggagagaaaat

SEQ ID NO: 731 - DNA, 2470 bp, Artificial Sequence
  chemically treated genomic DNA (Homo sapiens)
gtggaatatattttttatatagttatattatttaaaatttattgtttttaagtttttatttaaatgtttttttgtgaagttatttttgagttttttttaaaattgtagttttttatttttgtattttttattgttttttatttttaatttttgttattgtagttagaattatttgatatatagtttttattttattggttttttgttatgtttttttttataagaatttgaagtttattaggttgggagttttgtttgttgtgtttgttgttattttttagtgtttaaaattgtttggtatatagtaggtatttaataatttttgaattagtgaaaattagatggtggtttggtatttttatataggaatgagttaggtggaaattatttaggatataagtagattttgaagtgataaggaagggttattataattatgtggggtttattttgtttttttttgttttttttttttaggtttagtaatagttttattaaggattttatgaatattaaagtttatatttatatgttgttagaggtgagagtagtttattttattattagattttgtgtttagggtggtgatttgaagaaggaagagagtgaaagaagggaaggattatttttttttttaaattggagttaagggagggaggttagagtaagtttgggggtgtaatttagatttagtttttgtttaattttttttgtttttttttttaggggtttagagaattataaggtttgtagaattttttagagaagttttattattgattttttttttttatttttagatattaaagagtttgaatgtttttgagttatatggtttttttttttttttataaattttgttagttgttatgggggtttgtttttagggtataaagttattgagagatttagagatttagtttttttgtggaatttttaaaatgttttagtagttttgtttttagtttgttgtttggtagtatttgttagttgattttatgtattgtttttttttttgttattttggtaatttgggttttttattttatttttttttttatttttttttttagatgttattttttgaattgttatagagaatgggttaatttatggtggaggtttgtttatttttataataattaaagggttttaaggtttatgtttttatatatttaattattttttaggtattttaaattatatttaaattttaatttagttttattttgttttagtttttgtttgtaagtgttttagtttttaatgggtatagatttggattttgttttttttagttgggtttttattttaggttgagtttagttattgttaattaatgtagagttaggttttttttttttttaattttggttgtagtttaattttgttttttgaaagtattttgtttttgttatttaatgtttttttgtgtgtttgatagttattttgtttttttatttttgttgtgttttaaatttgtttttatttagttttatggttttgtttaattgtagagttgttttgtttgtttatgtggagtttagtttgatttatttttgttggttgttatgtttatttttatataagttttgtttttgttgagtagtatggtgtgtgatattgtttttttggtgttttggtaggggtttagaagttttttgtttgttaattagagaaaaatagggttatttatttttgtttttgggggttgttttttattaattttatgtaagttaattagtgtgaggtagatttttgtttttttgatataggttttgagtttttttagttgtttatagtttgttagtttttgagttaattggtgtggagtattgtgaaggttgaatgtgtttttttgggattttaggggttgtgagtgttttattatttttttttatgttaattatggtatagttttgtagggaagggtttgttttttaattttttgaggttttgtggttgattaatagtgttttggttaattagtgagtggtgggatattgggttttttttttttgggtttatgtgagttgtagggaaatgtaggggtggtttttaggtgttgttgttgttattgttattattatttttattgttgttttggaatttaggtttggggggtggtggggttgtgtatggagtttttgttttttggagttgttaatattgttaatgttattgttatgttatatataggtgagttttgggtttggagggtggagggtttagtttgtgattttatgtattttttttgtttttgtgtagaggatgtggtttggttggtggtttgttggtgtttgattttttgttgttattattatggttggtggatttgtgtgtggtattgtttaagttttttgttttttatagtggatttgattgtggtttaattttttttttttgttgtataatggattggtttgtgtgtttatgtttttttttatgttaatttagggtggatttgttt

SEQ ID NO: 732 - DNA, 2470 bp, Artificial Sequence
  chemically treated genomic DNA (Homo sapiens)
ggatgagtttattttaagttggtgtggggaaaaatataagtatgtagattgatttattatataatgggagggggaggttaggttatggttagatttattataagggatgaagggtttgagtaatgttatatgtaggtttattagttgtggtggtggtggtggggagttgaatattagtaggttattggttaagttatattttttgtgtgggggtgggaaggatatgtggggttatggattgggttttttattttttaggtttagagtttatttgtgtgtagtgtggtggtggtgttggtaatgttggtagttttggggggtgggggttttatatgtggttttattgttttttaggtttgggttttgaggtggtggtggaggtggtggtggtggtggtggtggtagtatttagaagttgtttttgtgtttttttatagtttatgtgggtttgaggaggaggagtttaatgttttgttgtttgttgattggttaaagtgttattaattggttgtaaggttttgaggggttgggggatgggtttttttttatagagttgtgttgtgattggtgtaaggggaaatgatggaatgtttatggtttttggagttttgaggaggtgtgtttggtttttatggtgttttatgttgattggtttaaggattgatggattgtgagtaattgaaaaggtttggggtttgtgttgggggggtgggggtttgttttatattgattggtttatatgggattgatggaagatagtttttaaggatgggggtgggtggttttgtttttttttgattggtggatgagggatttttagatttttgttaaaatattaagggggtggtgttgtatgttatgttgtttagtggaagtagggtttgtatagaaatgggtgtagtagttggtgggagtgggttggattgggttttgtgtaggtgggtagggtagttttatggttagataagattatagagttgggtaaagatgaatttagaatatagtggaggtaggagggtaggatggttgttaggtatatgaaagagtattgagtggtagaaatgaaatgtttttagagggtagggttgaattgtggttagagttaaaaaggggaggaatttggttttgtattgattggtggtggttggatttaatttagaataggggtttgattagggagagtgggatttaggtttgtgtttattggaagttggaatatttataagtaggggttaagataaggtagggttgagttagggtttgggtgtaatttggggtatttggggaatgattgggtgtgtgaaagtgtaaattttagggttttttgattgttgtgggaatgaataaatttttattatgaattggtttattttttatggtaatttaaagggtggtgtttaggaaaaggaatggaagaaagggtgaggtggggggtttaggttgttaagatgatagaagagagggtagtgtataaggttaattggtaaatattgttaggtaataggttggaggtaggattgttggggtattttggaggttttatagagagattggatttttgggttttttagtaattttgtgttttaggaataggtttttgtggtaattagtagggtttatggggaaaaagaagggttatgtgatttaaaggtatttaggttttttaatgtttgaggatggggggaagaagttaatggtgaggtttttttgggaaattttgtaggttttgtagttttttaagtttttgaaaaagaggatagaagagattgaataaagattgggtttgggttatgtttttaggtttgttttgattttttttttttgattttagtttagagggaaagatggtttttttttttttttgtttttttttttttttaggttattattttaaatatagagtttggtagtggggtgagttgtttttatttttagtaatatgtggatatgggttttgatatttatggagtttttggtgaggttgttgttgagtttagagaaaagaaataagaaagggtaaaatgggttttatatgattatgatgatttttttttattattttaagatttatttatattttggatgatttttatttggtttatttttatgtggaaatgttaagttattatttggtttttattgatttaaagattattaaatgtttattgtatgttaggtaattttaggtattgggagatagtagtaaatataataaataaaatttttggtttgatggattttaaatttttgtaaagaaagatataataaaaaattaatggaataaaagttatgtgttagatggttttaattataataataaaaattaaaaatgagagataataaggagtataggagtggggggttgtaattttaaagagggtttagggatggttttatggagaagtatttgagtaaagatttaaagatagtgaattttgagtagtgtggttatatggaggatgtgttttat

SEQ ID NO: 733 - DNA, 2408 bp, Artificial Sequence
  chemically treated genomic DNA (Homo sapiens)
attttttgaagtgttagattggagttgattggtgattaatttaaaggagttataatttaaagaaatggtgagagtttggtatttaggtttggtttttaggtaatttgtttgggtttgagaggttattaattgttagttaagatggaattttttttttttttttttttttttaatggataataatgggaagggggttaattttttagtagttgaaattttgtatttagttttttattttgagaatgttaatttttggtttgaggatttgtttttgtagtgttggtattgagatttaagggaagatattttgttttaaatgttagttatggtttggttttttttttgattttagtattttgtagattgttagtgtttgtggtgggggatgaaaggaatagggttttgtaaggtttgtttgttgattgtgttattttgggtgaaatttagttttaaaagttataaattatttatggtgaagattttttgaagtggaataaatttttagatttgtattattttatatttttgtgggatagatggtttttatttattggttattgggagagagttgttgtttttgtgttttattgttttttggggtgatttttagtgagttgagtttttggttgtatggtaagtgtttgaaagttgggtttgagaggattgtagggtttttgagggtgttaagttttgaaggagtttatgggtgtattggggtttttgaaatttagttgttattggtagtttttttttgtttttttttagtttttttgtttggttttgtattttttttttttttttttttttttattttttttttttttttttgtttttattttgtgtggggagtgatgtgatgttagtagagattttattaaattttattgtatagtggtgtgtgggtggttggttgagtttggttgtgtggttggtgatttaggagtgagtatagtgtttgggtgagtgttggggggagtgagtaggggtgatgagaaatgaggtaggggagggaagtagatgttagtgggttgaagagttgggagttggagttgggagagtgaaaggagaggggatttggtggggtatttaggagttaattgaggagtaggagtatggatttttattgtggaaaggaggattagaagggaggatgggatggaagagaagaaaaagtaatttgtgttaatttggtagttttaataaattaaagggggagtgttagggtagtggggagatagaaatgtatttttggggagtaaattaggatgggttgggaggaagtgatagggaaagtggtttaagagatggaataaaggataatgtttatggggttgtttgggatgaggtgtgtggagtgtgggtgtgagtgtgtgtgtgtgatttttttttaggtttgtagagttgaggaaagaggttatagtaaagagggattgtggagggaggaaagtgagagattggtagagggtgggagtggaggtgggtgtggtggggatgggagaggatgagtgaagagaaatttagaagaatggagtgagttagtgggagagggtgggagggttatagttgggagtgaatgagttaggtttgttagttggggaaggttgggatgttgggtttagtttagttgggatattgtgtttgaggttaaggtgggtggattaggtatgttgagagtgttggtgtataggtgggtatggttatgtattgatttagtgtttatgaagggtttgtattggataaggtttagatgtttatagagtttagaattttttttgttgtatttatatttaataagtttattttgggttatggatattttattttttaaaatgatgaggttaaggtttttggtgaggatggtattaaattgtatgggatagaagtgggggtgggggagagagttttttttaagtttatatttgtttttgtaaagtaaagagtatgtgaaattatagggtatatttttatttgaaaagtgtgttttatttttgaattttgattttttgattttttgatttgagtaaagatgtgtattttggtagtgagtagaatattttggttttgttttgtttttgagtggaaggattataaatataatttgtttggaggattaggtgtgaaggtttttgttaggtatatgggataatgtttttttaattttaagggtattttgttaatgtatgtttttggaaagtgttggaatatagttattgtttttggatttggatttttttattaatattaatttttgtttgagagtaaaatttaggtttgttattaaaaagatatttttttggtttttaattgagaataaagttttttttaaaagttgtattgttttttttaaattaatatattaatatttgtaattttagaaatatatagtgatttgggagaatgtgtataaa

SEQ ID NO: 734 - DNA, 2408 bp, Artificial Sequence
  chemically treated genomic DNA (Homo sapiens)
tttatgtatatttttttgagttattatatatttttaaaattgtgagtattggtatattgatttaggaagagtaatataatttttagagggaattttatttttaattagggattaaagagatgtttttttaatagtgggtttgagttttgtttttaagtaggaattaatattggtgggaaaatttgaatttaggagtaatggttgtgttttggtattttttaaaaatatatattaataggatgtttttgagattgaaaaaatattgttttatatgtttggtagaagtttttatatttggttttttaggtgaattatatttatagtttttttatttagaggtaggatagagttaaaatattttgtttattattaaaatatatatttttgtttaagttaagaaattagaaaattagggtttagaagtaaggtatattttttgagtgagaatatgttttgtaattttatatattttttgttttgtaggagtaaatgtggatttgagggaaatttttttttttatttttatttttattttgtgtaatttaatattatttttgttaggaattttaattttgttattttaaaaaatgagatatttgtgatttagggtgaatttgttgaatgtaggtatagtagaggaaattttagattttatgagtgtttgagttttgtttagtgtaaattttttgtgaatattgggttagtgtgtggttgtgtttatttgtgtgttgatatttttagtatgtttggtttatttgttttgattttgggtgtggtgttttagttaagttgggtttagtgttttggttttttttagttgataagtttagtttgtttgtttttggttgtggtttttttatttttttttattagtttattttatttttttagatttttttttatttatttttttttatttttattgtgtttatttttatttttgttttttattggttttttatttttttttttttgtagtttttttttgttgtgatttttttttttaattttgtaggtttgaaagaaggttatatatgtatgtttatatttatattttatatgttttgttttaaataattttatgaatattgttttttgttttgttttttgggttattttttttgttgtttttttttagtttgttttgatttgttttttaaaagtatgtttttgtttttttgttgttttggtgttttttttttgatttattagggttgttgggttggtgtagattgttttttttttttttttattttatttttttttttggtttttttttttatagtgggagtttgtgtttttgttttttggttggtttttaagtgttttgttaggttttttttttttttgtttttttggttttggtttttgattttttggtttgttggtatttgttttttttttttgttttgttttttgttgtttttgtttgttttttttggtgtttgtttgggtgttgtgtttgtttttggattgttagttgtgtagttgggtttggttggttgtttgtgtgttattgtgtagtggagtttggtggaatttttgttgatgttatgttattttttatatggagtaggagtagagggaagagagagggatgagagggagggagaggagagagagtgtgagattgagtgagaaagttggagaggagtagaaagaaattgttagtggtggttagattttggaggttttagtgtatttgtggatttttttggaatttggtatttttaggagttttgtagtttttttaggtttggtttttgggtgtttgttgtgtagttggaggtttggtttgttggaaattgttttgggaagtagtgggatgtggagatagtagtttttttttggtagttggtaagtggaggttatttattttgtagggatgtgagataatgtgagtttggaaatttgttttattttggagaatttttattgtaggtgatttgtggtttttggggttaagttttgtttaaggtaatgtagttggtaaatagattttgtaaagttttgttttttttgttttttgttatagatattaataatttatagggtgttgaagttgagagggaagttagattgtggttggtatttaaaatgaggtatttttttttaaattttggtgttaatattgtaggaataaatttttgggttaaggattagtatttttaagataaagggttgggtataaagttttagttattggaagattagttttttttttattgttatttattgggaaaaaaaagaaaagaaaaagattttattttaattggtagttagtgattttttaggtttaagtgaattatttgggagttaggtttggatgttaagtttttattatttttttggattgtaatttttttaaattgattattagttaattttaatttggtattttaggagat

SEQ ID NO: 735 - DNA, 2378 bp, Artificial Sequence
  chemically treated genomic DNA (Homo sapiens)
attttgagattttagttgattttttttgttttgtaattagaggggattgtgatttgggttaattttttttttatgggttttagtggagttagttgtggaatggaatattaatttttattttataggtatgttgtgaggttttgttaagaaatagttataaaagggttttaagagttatgatgattgttttaattatttagtagggagggggtatttagtggtgttgtttttatgtattgatgttatgtggggtggggaggtggggtggagaatggagagtgtttttttattttttattttttttttttaagtttagtgtagggggaggtggttgtgattgattgaggggttagggaaggttggttaggggtgtgggtgtggttggggatggtttgggggtggggttgtgtaggaggttggaggagttttgtgggatttagaggtggggtgttggtttggggattattgtttttttggggtgtggttgtaggaggttggaggagttttgtgggatttagaggtggggtgttggttggggattgttgtttttttggggtgtggttgttgttgagtattttttagtttagttgagtttgtgtttaggttatgttttgttttagttgttgttttttttattttatggtgtttggagttattttttgtttgtttgttttttttttttgtttattttttgtatttgggtttgtattatttttgttaattgtttttttgattttgttgatattttttttttaaatttttgattggtatttttgtttggtatttttttttttatttttttttttttattttttttttttgattttttttgggtttttttttttttaaaatttgggtttttttgtgtggttttgtttttaggttggggatgttttttgtggttttgtgtttatggttttgatgttgtttttttttgtttataagttgtgttgtttttttgttatgttgggtttatggtggggtgttgagtggttggtggtgtttgggttagatgggggtggtggtatgggtttatggtgggttgtgggtggtttgggtttgtgaaagtgttgttgggggtaggtattgaggtgtaggatgttttggagtgtgtgttgttggagttgtagtaggttttgtttgtgttgaagtaggtgggtggtgtgtgggttgtgggtgttggtttggttgaggttttttaattggtggaggaggtttggttgttgtggttgtgggttgtgaggtagtttagggtttgtgtgatgttatttgttttgatggtggttttgatttgttgttgtggttgttgtaggtgttggagttggagatgtgtgtgtaggttgtgtgtttgttggagtagattttggtggttgagaattggtgagtgtgttaggttggggttgggagagtgttgtgtggtgtggatagttaagtgtttgtgtttttgtgtgttttgtgttgtgtttttgttttttttatttttttgattgtttgtattatatttttgttaggggttagtttgtttgttttatagataaggaaattgagttttgggaaagtttagtgatttgtttagtggattatagtgaattaagatttgtttttagggttagtggggtgaggaatggagttataggataggagtttgtttttggttttatggatggagatggtattttattgttaatttttttttttttttgttttttaagtttatagtttttttttttattggtttgggtttttgtttatgatatttttttttgttattattttattttttttttaatgagagaagaagggaaatataatgtttagaaaagagggagggagatttttttttttttttttttttaggttgtaaggtgtgttggtttgaggttgtttattttttttttgttgttttaatttaatttttgttttattttttattttggtttttgtaataggttagatatgattttattttgtagttgttgatgggaaatagttttttgttgggaggtatgggtgggggaagaggatattggggtgtagagtttggtggggattaggtagagtgtgtgttttttttttttattttatttagtattaagatgttgtaagagggttaaatagaggtttggttgttatttttgtatgttttttgggattttttttggagtatgaagatttttaaggatttatttttttttttttttgatgttagagtagattaagttgttatattttagttttatgttgaagtttttagttttttaagtttagaagagtttttggaagagttatttttagtttatgtagtttttataagtgtgaagggagtgggttgggggtgttttttttgttatttttgaaaagaaaaaaattatttggtg

SEQ ID NO: 736 - DNA, 2378 bp, Artificial Sequence
  chemically treated genomic DNA (Homo sapiens)
tattaggtaatttttttttttttgaaaatggtaaggaaaatatttttaatttattttttttatatttgtgagagttgtatgagttgaaagtgatttttttaaaaatttttttaagtttgagaagttggagattttagtatgagattggagtgtgatagtttggtttgttttggtattagaagggagggaaagtgagtttttggaggtttttatattttaggagagattttaagagatatgtaagagtggtaattaggtttttgtttgatttttttgtggtattttggtgttaagtggggtgaagggagagaatatatattttgtttggtttttgttgggttttgtattttggtgttttttttttttatttatgttttttagtagaaaattgttttttattagtagttgtagaatgagattatgtttggtttgttgtaagaattagaatgaaggatggagtagaagttggattggggtggtaagaagggagtaagtagttttaggttagtatgttttatagtttggggaggagggaaaggagaggttttttttttttttttttgagtgttgtgttttttttttttttttattgggagagggatgggatgatggtgagagaaggtgttatagatgggaatttaagttggtgggaaggagagttgtgggtttggggggtgggggagagggagaattggtaataggatgttatttttatttatagagttagggatggatttttgttttgtaattttattttttattttattagttttgggagtaaattttagtttattgtgatttattgagtaagttattaaatttttttaaggtttagtttttttatttgtgaaatagataggttgatttttaatagagatgtagtgtaggtagttagagaggtgagggaggtaaaggtatggtgtaaggtatatgggaatgtaggtgtttaattgtttatattatgtggtgtttttttaattttggtttggtgtgtttattggtttttagttattaggatttgttttagtaggtgtgtggtttgtatatgtgtttttaattttggtgtttgtagtagttgtaatagtaggttgaggttgttattgaggtggatggtgttgtatagattttgggttattttgtggtttatggttgtagtagttaggttttttttattagttggaagattttggttaggttggtgtttatggtttgtgtgttgtttgtttgttttagtgtggataaggtttgttgtagttttggtagtgtgtgttttagggtgttttgtattttggtgtttgtttttggtgatatttttgtgggtttgggttatttgtagtttattatgggtttgtgttattgtttttatttggtttaggtattgttagttgtttggtgttttgttgtgggtttgatatggtgaagaagtgatatagtttgtaggtggagagaagtagtgttaggattatgggtgtggggttgtgggggatatttttggtttggaggtggggttatgtggagagatttgggttttgggaaaagagggatttgagaggggttggggaaagaagatggagggggaggaatggagagaagggtattaggtaagggtgttggttagaagtttgggggaggagtgttggtaggattgggggagtggttggtaaaggtgatgtaggtttagatgtagggagtgggtgaaaggagagagtgagtaggtgagggatggttttggatgttgtagggtagaggaggtggtggttggaataaagtgtggtttgggtatgggtttggttgagttgggagatgtttggtagtagttatgttttggaggagtagtggtttttggttgatgttttgtttttgggttttgtggggtttttttagttttttgtagttatgttttggaggagtagtggtttttgggttgatgttttgtttttgggttttgtggggtttttttagttttttgtgtagttttatttttaagttgtttttagttatgtttatgtttttggttagttttttttagttttttagttagttgtagttatttttttttgtgttggatttggaggaagggggtggagaatgagaggatgttttttgttttttgttttgtttttttgttttatgtgatattggtatgtgggagtaatattgttggatgttttttttttattaaatggttaaaataattattataatttttaaggtttttttatggttgttttttagtgaaattttataatatgtttatggggtgggaattgatgttttattttatagttgattttattgaagtttatgaggaagaaattggtttaaattatagttttttttgattatagaatagaaaaagttagttaaaattttaggat

SEQ ID NO: 737 - DNA, 2820 bp, Artificial Sequence
  chemically treated genomic DNA (Homo sapiens)
tttaggggataatatttaggtatgttaatggagtttaaaatgttaaggaaattatattataattttgtttagtatattataggttgttaaattgaaatgttatgttagttaggagtgtagtaatttttattttttggttttatttaattaggaagttttagtagagtgaagtttgttaagtgtttgttgttagaatttgaaggaatttgagtgagtaagaagagtgtttgatttattttatagaagtttgtttagaaatggaggagttagtgtttattgaagttggttttgtttttggtttgtttatatggagtttgattagttttagttatgtttattttggtttgggagatttgtaaagtgtttttttttttaatttttttgtattattttgaagtttagggaagtaaagagaggggtatatttggattgtaaaattaatgttttttgttgtttaggagagaagggaatgagagagagagagagatagatagatagagagagagagagagagagagagagagagagagagagagagagagaaattttattgaaatttagtttttttagaatttgtgtgatttggtttttaatgggagattagtgtgattttatggtatttttgttaggaattagtgatttttttgtagttattatttgatttattgtttttttgtttatttttttttataaagttattttttttttattttagtaagatttttttttttaatgatgataaagtttttgttttagtgttttttttaggattggtgtttttttaaaatagtgaatttagaaaattattttgtttaatattttttaaaatttttgtagttttaatgtaagtgtaagtatgtaaaggttttttgttatatttgtattttttgtttattttagaattattttttatttttgggtttgtaatagttttttttgtttttttggatagaggtgggtggtattaggggtttagggtagtaggaggtgaggggttgaggaggttgttagggtaggttggtttgtgttggatatgtgtgtttttttgtggagttaaagggttggggatgggggttttggatttattagagtaattttagttggtgggtgtttggtagttatttaaggaggtagggaaagtagtgagttttattgggtgggttatgatgagtagtatgatgggtagtagtagtagttagtaaaagtttttgtaaagtgtttagttgttgtattgttgtggggatttttatagtattatgattagtttgtgtaattttgtagtagtaaatggtttttgaggaatataggattgtgggggttgggtagtgggttattgagtattttgtggatggtggtagtagaggtggtggtggtggtagtggtatttggtggggaagtagtagttaaatttgtgtatgattttgagagttttagtaatatttagggattgggtttagttttggagtgagagggttgtttgttgagaagttgtgttggagatgtgggaagttgttgttataaggagggagttttgggaagttggaggataggaggagatgggagtttaggggtagatgagtggagtttgaggaggtagggtggagggagagttaaggtgttttgtagtttggtagttgttttttgagttttgttgtttgtatttttttggtgtttgggaagtagtaggtttttagtttgtttggggttatgtgggaagaggtagttgggttttgattggtggagtaggatgtaggttttgggagggaggggttgatgaggaggtgtaaggatgtaaggaggaggtggttgtggaagttatagatgggtttgtttgttaggtgttggtttgagtggggttaggtggggatggtttaaatgagaagtttgggttttagggtgggttatttgtatatttatatattatttgttttattttttgttttaggatgttttttattgaaggtggggtttggattagtgttttttttttgtgtgtgattttgggttgtgagtgtgggttgtggttgggtggtgtttttttgagttggagatggtgggggtggaggtgttagaggagtagtagtagtagggtagagaggggtgagttggtgtgggagagggtgttttgttggtgattggtgttttagtgtgtgggagtgtgttgtttaggttgtagggggatgtaggttgggaatgttgtggtggagaggttagggatgtttttttagggatttataggaaagagggtgagaggtgatggtgttagaattgtttttgttgatttggaagtaatagtagtattttttataagagtgtgtaattttaaggttgtttgttgaggtagtttagttattttggtaggtgttttttttttttttttttttttttttttttttttttaggttttttgtagttttgatttagtttaagtgtttgtaggtttgaatttttttttttattatttgtttttttttagtttgtagtttattagtgtgtttatttgggaggtgtggttagatgtgtttggaaggttagattggttgggataagtggtttgagagaaagagaaaggtttttttgtatatgttgtgggtgggttgttgggagtattggttgggtagtggtgtttgggaaggggagagtgggttttatttgttggtttaggtagtgattttgtgttttttatttgggtttttgttggatggttggtgatttggggtgatgagagaaggtttaatttggtaggagtttttggttttgtgtgttttttttattttttttagtgggaagggtaaatggtatagtgggatttgttttttg

SEQ ID NO: 738 - DNA, 2820 bp, Artificial Sequence
  chemically treated genomic DNA (Homo sapiens)
tggaaggtgggttttgttatgttgtttgttttttttgttggagagaatgaaagaaatgtgtagagttagagatttttgttgagttagatttttttttgttgttttaggttattggttatttggtaaagatttgagtaaggaatgtagggttattgtttgggttaataaatggagtttgtttttttttttttggatgttgttgtttggttgatgtttttggtaatttatttgtggtgtatgtagaggagttttttttttttttttagattatttgttttgattaatttgattttttaaatatatttgattgtattttttaggtggatatattaataggttatgggttggagaggagtgggtgatgaggagagggatttaaatttgtgaatgtttgggttgggttggagttgtggggggtttgggaggagagaggggagaagagagaaggaaggagagtgtttgttgggatggttgagttgttttggtgagtagttttggggttgtatgtttttgtgggagatgttgttgttgtttttaggttggtaagagtggttttaatattattgttttttatttttttttttgtaaatttttagagaaatgtttttggtttttttgttgtgatatttttagtttgtatttttttatagtttaggtggtgtgtttttgtatgttggagtgttggttgttagtaggatgtttttttttgtgttgatttgtttttttttgttttgttgttgttgtttttttgatatttttgtttttattatttttagtttggagagatgttatttagttgtggtttgtatttgtggtttggggttatgtgtggaagaggggtgttagtttggattttgtttttggtagggggtgttttggagtggagagtgaggtgaatggtatatgagtgtgtgggtagtttattttgaagtttgagttttttatttgagttatttttgtttagttttatttgggttagtgtttggtgagtgagtttatttgtggtttttgtggttgttttttttttgtatttttgtatttttttgttgattttttttttttgggatttgtattttgttttattaattagagtttgattgtttttttttatgtgattttgggtgggttgaggatttgttgttttttaaatgttagagggatgtgggtggtagagtttgagaggtggttgttgggttgtggggtgttttgattttttttttattttgtttttttgggttttatttgtttgtttttggatttttgtttttttttgttttttggttttttagagttttttttttatggtagtagttttttgtgtttttggtgtagttttttagtggatgatttttttgttttggggttgagtttagtttttggatgttgttgaaatttttgagattatgtgtgggtttggttgttgtttttttgttgggtgttattgttattgttgttgtttttgttgttgttgtttgtgggatgtttagtagtttgttgtttggtttttgtgattttgtgttttttggaagttgtttgttgttgtagagttgtatgaattagttatggtgttgtgggagtttttgtggtagtgtagtagttggatattttgtgagggtttttgttggttgttgttgttgtttgttatgttatttattgtagtttgtttggtgaagtttgttgttttttttatttttttaagtgattgttaaatgtttattggttggaattgttttggtaagtttagaatttttgtttttgattttttaattttgtagaagaatatgtgtatttagtatagattagtttattttagtggtttttttagttttttattttttattgttttagatttttaatattatttatttttatttagagaaataaggggaattgttgtaggtttgggggtgaggggtggttttgggatgggtagaaagtgtaggtgtagtaggaaatttttgtatgtttgtgtttatattggagttgtgaggattttgagaaatattaaatgggatggttttttgggtttattgttttgaaagagtattaattttaggggaaatattgaaatagaagttttgttattattaaagaaaaaagttttattaggatgaggaagaaataattttatgagaaagaatgagtgagaaagtaataaattaaatggtgattgtaggggaattgttgatttttggtaaaggtgttatgaggttgtattggttttttgttgaagattaggttatatagattttagaggagttgggttttaatagaatttttttttttttttttttttttttttttttttttttttttttttttttatttatttattttttttttttttttattttttttttttttaggtggtaaaagatattggttttgtagtttagatatgtttttttttttgtttttttaagttttaaggtagtataggggagttgagaaaaagaatattttgtgggttttttaggttggagtgggtatgattgaggttggttaggttttatgtaggtgagttgagggtggaattgattttagtgggtgttgatttttttatttttggataggtttttgtggagtgggttaggtattttttttgtttgtttgggtttttttagattttgatggtgaatgtttggtaggttttgttttgttgaagttttttaattaaatagggttagaggatgggagttgttgtatttttagttggtatagtattttggtttgatagtttgtagtatattgggtagaattgtggtgtaatttttttggtattttaaattttgttaatatgtttgggtattgttttttagg

SEQ ID NO: 739 - DNA, 2280 bp, Artificial Sequence
  chemically treated genomic DNA (Homo sapiens)
attagtatagaattgttattataggattgtagtttaagtattagagtgatattaattggttatgtttaattgttttaaaattattttttaaataattatattgatattataatagaaattatgggtatttattttatatttagatggaaggtattattggatatgtattaaaaaaaagattttttgaaaaaaataaaataaaataaaatattattattaaaataaaagaatttaaaataatttttaaaaattttttttaataaaatatattgttaatttataaaatggattgatgattagttatgtaaatgttttaaataaaatttttatattttttttatagttaatttatgttttgaattgtttattgattataaataatggtgaaatggtattttttgattatattgtattttgtttatagaaagtttgatatgatggaatttattaggtaagagggtgggtgttgtgaatgagatgttgtttttagttgtgggggtgggtagagtttttggagtgtgtggattttatgtgagttatgtagtattttttgttttttgttagaagttaaagttatttatttataatatatttatgtttttgtgtaattgtttatttttgtgtagttaatagggagttattatggggttaatttataggggaaaaatagatatttatttttttatatagatgtggatatatgtatatatgtatagaattgtggtatttaattttataggttttggggttgagggtgagggtattgttagtttttttagtagggttgtgttgggttttttgttaaaaggggtttttagtaaagagtgagttggttgtgtttttttagttttttatagtttgttttttgttttaaggagggagttaagtaaggggttaggtttttttggttgtgtgagtttatagttatttatttatttatgtttatttaggttgatggtgtggggatttgggtatatgtttttttagtttttggggtgtttgtggtggggaaggatgtattgttttttttttgtttttttttattggggttggggttttagtttgagagtgagtgagagttatagttatatattttgtgggttttatttgtgttgtaaggtttattgtgttagtaggaagagttatagattgtttgtagggaattaattttggatgtggaggagttggtattttgttttttggattgtttttggttttttaggataaatatgagtatgtttattatggtgaaggtggaggtgataaatattagtagtagttttgggattaatattgagatggatattttgttggtgtttaggtaggagttggagtgtgttttggtttttgttaatttagtgttgtttttattgtgtgaagttaatgtgggtgagattttagtgtatagttgagggtagattttgttattggagaggagtatgaaattttttttaaagaagtttattggtgttttatatttgaggttgtttattagtattttggaatttaagtgttttgtttattgtttgaaaggtataattgtgtaggagtatttttaggggtttttgtggaggtttatttggatgatggaggttaattggtttagtatttttgttattgggaggtatatgaagtaattgttgtgtaggttgagtttagagagtgagattttagtgaatatgtttataggtagggattttagtaggttgttgttgagaatgaggatttttagtttgggtatggtattgaaagtgtttgggaggatgagttggatagtgttgtattttatgtttaggtattttaggttttgtagttttgtgaattttttttgggatagtgtgtttaggtaattgttatttatgtatagttatttgaggtttaaaaggtttttgaaagtgttgttttttatagtagtgatgttattgttgtttagatttaatagaatgaggtttttgtaatttataaagtgtgatttttggatgttgtggattttgttattttgtaggaaaagtttttgtatgttagagagtttgggttttaaattagttaagttgtttatgtttttgttgttgtagtttatttttaaatttgattttgggatgtggttgtagttgtagtttttagggtagggtaaattgttagttaagggtttgtttttggagttatttgttgttattgttgttgtgggtttgattttgatttgttagttgtttgggatttttgtatttttgtttggagtagattttggtgtggtatgatttttttgtttatttgttttga

SEQ ID NO: 740 - DNA, 2280 bp, Artificial Sequence
  chemically treated genomic DNA (Homo sapiens)
ttaagataaatgggtaagaggattatgttatattagggtttgttttaaatggaggtataaagattttaggtaattggtagattaaaattagatttatagtagtgatagtgatgggtagttttaggaataaatttttagttaatagtttattttgttttgggggttgtagttgtgattatattttagggttgggtttaaagatgaattgtaataataggaatgtgagtagtttggttgatttgaagtttaagttttttaatgtgtaggagttttttttatgagataataagatttatagtatttgaaaattgtattttgtggattataagaattttattttgttggatttgggtaataataatattgttattgtagagaataatatttttaagaattttttggattttaggtggttatatatggatagtaattatttggatatgttgttttgggagaaatttgtggggttgtaaaatttagagtatttgaatgtggagtataatgttatttagtttatttttttgggtatttttaatgttatgtttaaattgaggatttttatttttaataataatttgttgaggtttttgtttgtggatgtgtttgttggggttttgttttttaaatttagtttgtataataattattttatgtattttttggtggtaggggtgttggattagttaatttttattatttagatagatttttatggaaatttttgggagtgtttttgtataattgtgttttttaagtagtgggtagaatgtttgggttttgaagtgttgatgagtgattttaagtgtgagatgttggtgaatttttttagaaaggattttatgtttttttttaatgatgagatttgtttttagttgtatgttaggattttgtttatgttaattttgtatagtaaaaatagtattgggttggtggagattgggatgtattttaatttttatttagatattagtagggtgtttattttggtgttggttttgggattgttgttggtgtttgttatttttgtttttattgtggtgggtatgtttgtgtttattttgaggaattgaaagtggtttaagagatgagatgttaatttttttgtgtttgagattaattttttatagatagtttgtgattttttttattggtataatgggttttataatgtagatggggtttatagagtgtatgattgtggtttttatttgtttttagattaagattttaattttaataggggagggtagagggaaggtgatatatttttttttattgtaggtattttgggggttggaggggtgtgtatttaaatttttgtgttattagtttggatgggtataagtagataaataattgtgagtttgtataattgaaagggtttgattttttatttagttttttttttgaaataaagagtagattgtggagagttgggagagtgtagttagtttgttttttgttgagagttttttttgatagaaagtttagtatgattttgttggaagaattgatagtgtttttgtttttggttttggggtttgtggggttggatgttgtggttttatatatatatatatatatttatatttatatagagagatagatatttattttttttttgtggattagttttgtgatggttttttgttggttatgtagggatgggtagttgtatgaaggtatgaatgtattgtaaataagtaattttgatttttgataaaaaataaaaagtgttgtatggtttgtatggaatttatgtgttttagggattttgtttgtttttgtgattggagatggtattttgtttatagtatttatttttttatttgataagttttattgtattaaattttttataaataaaatatagtataattagaaagtgttattttgttattatttgtgattggtaggtagtttagagtataagttaattgtgaaaaaaatgtaaaggttttatttaggatatttgtatggttagttattagtttattttatgagttaataatgtattttgttgagggaagtttttaggggttgttttgggtttttttattttgatggtgatgttttattttattttattttttttagggggttttttttttaatatatatttaataatgttttttatttgaatgtaaaataagtatttatgatttttattatagtattagtgtaattatttaaaaaatgattttgaggtagttaagtatgattaattaatgttattttagtgtttaggttgtgattttatggtagtaattttgtgttggt

SEQ ID NO: 741 - DNA, 5907 bp, Artificial Sequence
  chemically treated genomic DNA (Homo sapiens)
gttgttggagtagggttttagtgtattgtgagtttttgttttttttgttttgtagtgttgtgagttttttttttttttgtgtttggttttgtttgtgttttttttggtgtgggtatttgtagatttgttaggaggttgatgagaggtgtttttatagagttttgtttttttttagatttttaaatgaaaagaaagagaaaagttaattttttgtttttattttgtatgtatttggagagtggttggtggtgagtgatttgtataattgttttttttgtggtgtttttggatgggtggagagaatttgggtgattgagtttgaggttgagtttttttgggagtgatttatgttagttatttttatttttaagggggatttgtggttgggtttatgtgtgaaggatgggtgttagggaaattgatttatagatgatttgttttgtgagagattgataatttagttttgtgggtttttggggtgtttagattagtttttagttagaggatttggggttgtatagtttttggattttggagggggtggtttgggggtgggagattgtgagtattagtttatgttggtttttttttattttgtggtggtgaggtgggaagggttaggatgtgagtttagtattttttttagaaatgtagtattttgtttttttattttttttgtttttggtgtttttttttttatgtgtttttttttgttttttttttaagggtgttttttttttgtttttagtttatgtttgaattttttggtgttttttttttttttttttagttttttttttatgttttttgtttttgggtattttttttttttaattttttatttttgtattgtttgattttgaggggtgggagtgtattgggttgtgtatgggtgggggtgttgtgttagttttgtgtagttgttttgatgttgttgttgttgttgttgttgttgttgttttttgtagtttagtttgtgttttgtggtagttttgtagtgtattagttattattgttgttgttgttgttttgttagatttgttgttagtttgtttggtttagttttgagagagttttgaatgttagttgtgagggttatgagttagagagttttggggtgttgtgtggagagtaagtggagatagtgattttgtgttttttagtttttgtttttttgtattgtgttttttgtatttttgggtttttttgttttttttgttgtttttattgttgttatggttattttgttttgtagtaagttgtttaatgtggttatgtttgtgtttaataagttttaggttaagatgagtggtatgtttgttaggatgggtttttaggtggttatggatgaggaggtggtgggttttgtgtattgtgatgattttgattttgagtattgttagggtttgtagatggatattttgaaagttgagggagagttttgtggggatgagggtgttgaagtgtttgttgagggagatatttattattagtgaggtagtggagtttttttgttgttttttggttttaaggattaggtgggaggtggtggtgaatttgggggttatgataagtttaaaattatggtgtgggaggtaggttggaatgtgattaatgttatttaggtaagtgtgggatttttagttttgtttgttttttttttttttagtttagtgtgttgggttttgtttttgatagttgtttggtgattttggtttggagatttttttttgtatttaggaatttttttttttttattttttttagttttgtgtggggatttatgtttttaggtggtgttttttgttttaatttatgtttttttttaatggtattagttgtaagattgttaggttgaagtttggtttgagatatttgtttggagatattgtaaaagtgaaggaaatggggggagggagtaggaagtgatgagaaagaaagaaaattaggattggagggtatggtttggttttggattttggaatggatttatagttgtatttttgggaggaaagaagaaggggaaattgttgaggttggagttttttttttttgtatatatgtatagatatgtatatgtatataggtaggtatattatatgtttatagtttttttttttatgaataaaggtgtaggtataggtgtatatgatatgtatttatatatagattatagtattatttttaaatgtatttgtgtatatttttatagttttataaataaaagtatatatttgtatatattaaatatatgaatatttgtttgaatatatgtatatatatatgtatagatgtatgtagataggaattagtttgtttttttgggtgtggttttgttggagatatataggtatatatatatgaaagtatatatatgtttttatataaatatatttagtttgtaataatttagtattatttgtgtatagatttgttttttttgtttgaaattttggttgtattgtaaagaggtggttagtttttttttgtgtgattttggtgaagttttttttagaggttaagaatggtttttgttttttaggttttttttttttatttttaattttttattttttattaggtggtgtaggatttttatatagggagtaggtttggagttttggtaatgatttttgagttagtaggggttggtaggttgtagttttttgggttgaaggagattttagttttaggtaattttggttttttatagtttggttttgtggtgtttttggagtgtattattattggggttatggaaggtaggttttttgggagtagaggttttttaggggttgttttatgtattggggtaagtaggattttattgggttttgaatattagatggtttgatttaaggtgttttttgttttggggtttggtgagatggttttgttggattatggatttggggttgtttttgtttttgttgtgttttgtgattttttggggtgttttttaaggttttgtttgataggttttaagggaggttagggtaggaggttggaggtttgtaggtttttgggattttggattttgttagtttttagtttttgtgtggattttaaattttatagttttgtttgtttgattttgaagtttttggttttagatttttgtttggtttggttttttggtttttttggtgtttttttgttaagtttttttttttgtttgtttttttagtttttatttagtttttttttttaggttttgtttttgttttattttaattttagttttgttttaagatttttaatttttagttttgtttttttttttttgtgtgttgttttttaagtgtttttatattgtttttgtttttgttttttaggggttttgttttatttttagtttttttttttttttattttattttttttttgttttataattgtagtttttaatgtttttttttttggtttgagtttgagatgtttgagtttttttttttagtttttgtgttttattttagttttattataaattttgtgtttattttttttattggtttaggtttagtttattattttttttagagtttttttttgattatgtttttttttgtttttttttatttttttttttaattttttattttgtttttgtttttagaaattattttgaagtatttttttttttttttgtggtttttttttatttttagtttttttttattttagtttttttgttattattagttattagtgtattttttttttttagatttgtttatatatttttttttttttatttttggtttgatatttgggtttattattagtttttttatatttattttgtagtttgtttttaattttttttttttggtggtttagatttaatttttagtgtttttagtgttttttttgggttatagtgttaagttatgttttttgggttttttatttgttgttaagtttgttgagtgtttgtgtttggttgtttttttgttttatagggtatgtttgtgttgggtttattttatgttattttgtatggtggttatttggggttgttttttattatttttgttgttgttgtgtgttgttatattggtaagatttttattgtgtgtttgtatgaggagaatgaagatggtgaggtggtgtgtgtgtgggatttgtatgtggttatagttaatgtttgttgtgttttgtgttttttaatgttgggtggttgagtggtgaatgtagtgtagattattgagttggtgatgatgtgtattttgtatgtggtggtgagtggtaattttatgtataatagttttttggggttgtttgtgttgtagaagttttggtttattattgttatggttgtgttgttgttttgtgttttttttaagaattttaaggttgtgtttaagtttagtttgttgtgtattttggtttattttgttattaatattttggttatagtttattgtttattgtgggtgtgtgattgggtttgggagaaggttaagttttatattgatgttaagaagttttttatttttattggtattattgtgtttagttatatgttttagatttttttgtttttgttggagggtaatatgtagtagtttagtgagttttattgtatgatgaattggatgtatattgtagtttgtgtgtttaagggtttttttgtgtttgttgtttattttatttgggttgatgagattaaggaggttattatggataatttgtttggttttatttgtgttgtggttaatatttttttggtggttaaggtgttgttgttttattttttgttattttttgttgttgttgaggtgttggagaagttgtttttttaggaaggtagttgtgttttttttttggtttgttatagtggtgatgggtgtttgaagttttgggggttgatgttgtgttgtgtgtttgttgtttttatgttgtttatggttatttatgtgttgtattttgtgttgtttatgggttttattggtagttttatgggtgttggtttttgttttttgttgtttagttttttttatttgtgtttgttttggtgtaagttgttgtggtattaagttttttttgatgttgttatttttgttattggtggtatttgtagtgtgtttggttttgtgtatttttttgagggttttattgaagtttattgaattaatgtggaggattagggtgtaagggtgagtttttgttgtgtttttgtgtttttttttttttttttttattttgtttttattagtttagtgtgttttgttgttgtgttgggaggttaagttttaaatatttttggtttttagtttttgattatttggggatgggggggatgggaggggatagggatttatgatttattgtgtttgtgtttttgttgtttttttttttttataatattttggttttggggggaggtggggtgtatttgtgggtagggttttttgtttttttaagtggggttttgatattttggttttagttattgagggggttgggaagggagggagagggggtgtagtttgtaggtgtggtaatttgattttgggggaatattttatatttatttagagtttggaatttatagtgtttagttatttttagtaagagtgttttttattttggagatgttttaattttgtagtgggaaaggttgattgggaaatttattttgggtgggtaattttttttaatgaagttggaaggtgagaagttgtggtggggttagtttgtttgttggtttttaggaatttaaatttttattttgtgtaatttattaggtgtggaattgttttattgtgtgtgtggtgtgtttgtggtgaataagatgaaatgtatattagaaaaaaatttatttttaatttagagtgtggtatataattatatttgtaaataaagaagagataaaggtttgtgtggtttggtgttgggtttgtg

SEQ ID NO: 742 - DNA, 5907 bp, Artificial Sequence
  chemically treated genomic DNA (Homo sapiens)
tataaatttgatattgggttgtgtaagtttttgttttttttttatttgtggatataattatgtattgtattttaaattagagatagatttttttttgatatatattttattttatttattatgagtatattatatgtatagtagaatagttttatatttgataaattgtataagatgagagtttagatttttgaaaattggtaggtaagttggttttgttgtggttttttgttttttggttttgttgaaggaaattgtttatttaaaatggattttttagttagttttttttgttgtagggttgaaatgtttttggaatgggaagtgtttttgttggaaatggttggatgttgtagattttgagttttggatggatgtgaaatatttttttaaggttaagttgttatgtttgtgagttgtgttttttttttttttttttttaatttttttgatgattggaattaaagtgttggggttttatttggaaggatagagaattttgtttgtaaatgtattttgtttttttttaaaattagggtgttgtggaaaagaaaggataatagaaatgtagatgtgatggattgtgaatttttgtttttttttattttttttatttttgaataattagaaattaggaattagagatgtttaaagtttggttttttaatgtggtggtagggtgtattgggttggtgggggtggggtgaggggagaagggagagagtgtagaagtgtggtgggggtttgtttttgtgttttagttttttgtgttggtttggtaggttttgatgaggtttttgagggagtgtatgaagttggatatgttgtagatgttgttgatgatgaagatggtgatgttgaagaagatttggtgttatagtagtttgtgttagagtaggtgtaggtgaaagaggttgggtagtaagaaatagaggttggtgtttgtgaggttgttggtgaggtttatgagtagtgtgaagtgtggtatataaatggttatgagtagtgtgaagatgatgagtgtgtagtgtagtgttagtttttaggattttaggtgtttgttgttgttgtagtaggttgggaaaaaggtgtggttgtttttttggaagagtgatttttttagtattttgatagtggtaaagaatggtagaggataggataatagtgttttggttattagaaagatgttgattatggtgtggatggagttgggtaggttatttgtgatgatttttttggttttgttggtttaggtgaggtaggtgatgagtgtgaagaggtttttgagtatgtaggttgtgatgtgtgtttagtttattatgtagtggaatttgttgggttgttgtatattgttttttagtgaaggtaggaagatttgagatgtgtagttgaatatgatgatgttaatggagatggggaattttttgatgttgatgtagaatttgatttttttttaggtttagttgtgtgtttgtgatagatagtaggttatgattaggatattgatgatgaagtgggttagagtgtatagtagattgaatttggatatggttttgaggtttttaaggaaggtgtaaggtagtagtatggttgtggtgataatggattaggatttttgtgatatgggtagttttgggaagttgttgtatatgaggttgttatttattattatgtataggatgtatgttattattagtttgatgatttgtgttatgtttattatttggttgtttagtgttgggaagtgtggggtgtagtaggtgttggttatggttatgtatgagttttgtatgtgtattattttgttgtttttattttttttgtataggtatgtgatgaggattttgttggtgtagtagtatataatggtggtgaagatgatgagaaataattttaggtagttgttgtgtaggatggtgtagggtaggtttagtatgaatatgttttgtggggtggagaggtaattagatgtggatgtttagtgaatttggtaatggatgaggggtttggggggtgtggtttaatgttgtggtttgaagggggtgttaaggatattgagaattgggtttgagttgttggggaggagaggttaagagtaggttgtggggtggatgtaggggaattaatagtgagtttgggtgttgagttagagatggagagggagggatgtatggatggatttgagaaggaaaggtgtgttaatggttggtgatagtgagagggttagggtgggagagggttgagaatagggagaagttataggagggaagggagatattttgggatggtttttggggataggaatagaatgaggagttgggggaggagatgagaagggatagaagggagtgtagttggaaaggggttttaagaaaggtagtgagttgggtttgggttagtggaaagagtgggtatgggatttgtggtggggttggaatggggtatgggagttaaagaggaaaatttgggtgttttaggtttagattagaggaggaaatgttaaaggttgtagttgtgaggtgaaaaggaaatagggtagagagggagaggggttgaaggtggggtaaagtttttgggaggtaagaatagagataatgtgaagatgtttggggagtagtgtgtggggaggaggaagtagggttggaaattgagagttttaggataaggttggagttagagtgaggtgagggtgagatttaaggaaggggattaagtggaggttggggaggtaagtaggaggaggagtttggtgggaaggtgttagggaggttagaaagttgaattgagtaagagtttagaattagaagttttagggttaggtggatagggttgtagggtttagaatttatatggggattaagagttaatgaaatttagggttttggaggtttatgagtttttagttttttgttttggttttttttggggtttattaaatggagttttgaaagatgttttgggaagttgtggggtatagtgaaggtgggagtagttttgggtttgtgatttagtaaggttgttttgttgggttttggagtggaaagtgttttgggttgggttatttggtgtttggggtttggtggagttttgtttattttgatatatggaataatttttgggaggtttttgtttttagaaaatttgttttttgtggttttagtgatagtgtgttttagggatgttgtggggttaagttgtaagggattggggttgtttagagttgaagttttttttggtttagaaagttgtggtttgttagtttttgttagtttggaggttgttgttaagattttaaatttgttttttatgtaggagttttgtgttgtttggtggggagtggggggttaggaataaggggagagggtttagagagtaggggttatttttagtttttggagagggttttgttagggttatatggggaggagttggttgtttttttgtggtgtagttgggattttgggtgagaggggtgagtttgtgtataggtaatgttggattattgtggattaaatgtgtttgtgtgggagtatgtgtgtgtttttgtgtgtgtatatttgtatgtttttaatagggttgtatttaagggagtaggttggtttttgtttgtatgtatttgtgtatgtgtgtgtgtatatgtttaaatgaatatttgtgtgtttggtatgtgtaggtatatgtttttgtttgtggagttgtaggggtgtatgtaggtgtatttggggatagtattgtggtttatatatagatatatgttgtgtgtgtttgtgtttgtgtttttgtttgtgggaaggggggttgtgggtatgtggtgtgtttgtttatatatgtgtgtgtgtttatgtgtgtgtgtggggggaggagattttgattttagtgattttttttttttttttttttttaaaaatgtagttgtgaatttgttttagagtttaagattaaattgtgttttttaattttgatttttttttttttttattgttttttgttttttttttttattttttttatttttgtagtgtttttggataggtgttttagattgaattttagtttagtggttttgtagttggtgttgttgggagggagtgtgggttagggtggaaaatattgtttgggggtgtaggtttttgtgtagggttgggagggatggagaaagggagatttttgggtataggagggggtttttaggttgagattattgggtgattgttgggggtagagtttggtatgttgagttgggaggggggaggataggtagaattgggaattttgtgtttatttggatggtgttggttatgttttagtttgttttttatgttgtgattttgggtttgttgtggtttttgaatttgttattattttttatttggtttttggagttggagggtggtagaggagttttgttgttttgttgataatggatgttttttttgatgggtgttttagtgtttttgtttttgtagggtttttttttggtttttaggatgtttatttgtaggttttggtggtgtttaaagttgaggttgttgtaatgtgtgaagtttattgtttttttatttgtggttgtttgaaaatttattttggtgaatatgttgtttattttggtttgggatttgttggatatggatgtggttatgttggatagtttgttgtggagtaaggtggttatggtggtggtggggatagtggaaaggatagaaggatttgaggatgtggggaatgtgatgtaagaaggtgagggttggggggtgtaaagttgttatttttgtttgttttttgtgtggtgttttggggttttttggtttatgatttttgtagttggtgtttgaggtttttttagggttggattgggtaagttggtagtaggtttggtggagtggtggtggtggtggtggtggttagtgtattgtggagttgttgtggggtgtgagttgggttgtggagggtggtggtggtggtggtggtggtagtggtgttagagtagttatgtgaagttggtgtggtgtttttatttgtgtgtagtttaatgtgtttttgttttttggaattaggtggtgtgggggtgggggattggagagaggaaatatttggaggtaggggatgtgaggaaggggttaggagaagagaaagggggtgttgagggatttagatgtgagttgggggtagaagaagggtgtttttgggaaggaggtgggagggagtgtgtgaaagagggagtgttgagggtaggggaggtgggggggtgaagtgttgtatttttaggggaggtgttaagtttgtattttggttttttttattttgttgttgtagggtgggagggggttggtgtgggttgatgtttgtagttttttatttttggattattttttttagggtttgggagttgtgtagttttagattttttggttaaggattggtttgggtgttttgaaagtttgtaggattgagttgttagttttttgtggagtgggttgtttataagttagtttttttggtatttattttttgtgtgtaaatttggttgtgagttttttttgaaggtagaagtggttggtatggattgtttttaaggaagtttagttttaggtttagttatttgggttttttttgtttgtttagggatgttgtgagggaagtgattgtgtggattgtttgttattagttgttttttaaatgtgtgtagaatggaggtgaaaggttggtttttttttttttttttgtttgggggtttggaagaaggtaggattttatgaggatattttttgttagttttttagtgggtttgtgaatgtttatgttgagaggggtgtagatggggttaggtgtggaggaaagaagggtttgtggtgttgtaaggtggaggaagtagaggtttgtggtgtgttggggttttgttttgatggt

SEQ ID NO: 743 - DNA, 2315 bp, Artificial Sequence
  chemically treated genomic DNA (Homo sapiens)
ttgtatttggtgtgaggttttttggttatggatgttgttggtgttatatttgtggtatttgaggtgaattgtttagatggaaatggtattattaggtaattggtaatagaagtttaaagttttgggtgttttaggttagaggaaggaaggaatgtaagggttttgttttttttaatgttaggagtgtgtgtttatagttttagataggataatttattgtaaatttaaagtagaaaatatggtttaattttatttttgtggtatttttatagatggtgtttatttgttttggtagtgatgattgatattgtgaatgttgtgttggtagtgtgtttaagggttttaattgaattattttgatggagttgaaatttagttttattttatagaagagaaaattgaggtttagagagattaggtgttaagttttatgttaagtatagggaagtaaaaataggatatatttaatataaggtggttttaggaattagtggttaggatatgggaggtgtgttgagtgtagatgggtagatgtaagttgaggtggtttgttggagggttttggattttttagaaaagaggatattagttgtttagggagggaaggtttgagatggattttggttggtgtggattagtttatggtgtgtttgtaggtagggatattttgaatagatatgggttgaggggagtttgtgtggagtgtggttagtgaaggttgggttggttggtagggtttgttggttatgggaggtttggtttgtagtagtagggtttattaaagatatggggatggatggttgatggataagatggttgatggatagtgttttagaaggttgtaggtttgtttaggttgaggttagggagggttagggtttttagggaaggagagtaagttaggggagttttttgtatagaagattttttatttgaggttgttttttaggagtttagttattttgtggagagtttggtgttgattgtggaagaggtgatggatgtgtgttgtgtgttggtgaaggttgagatggaaaagtttttgtagaataaggagttttttagtagtttgaagaaggggaaggtgaggttgtttagatgtggggttatgtttttgtttgttgggttaggggtgggtgttgagagggttagtttttaggattgtttgtttatgatttggttgggagttttgagggggtagtagggatagggtgggattttagggagttttggataaagtggggttttaattagttttttttgatagatttgttgttgttgttgggttaagtttttgttgtttttgtggttgtttagttgttttttttgtaagaggtgagttttttttttagttgttagtttataagggaaggaggaggtgagaaattttggggtagtattgtttatagaattttttgtgattttaggaatgttttagtatgtttgatggttgatgagtttataagatatggttagtatgaatgaggagttaaattttaaattgtatttaaattaaattaaatttaaatagttaagtaatttttagttttagttaagatggggtaataggtattttttatagttaagaataaataggatgtgaaataatggtttttaagatagtaggtaataaaaaggaaatataatggggtaagtttgttattattatagttattgtttggagagtttttaggttatgagttatagttgttggattttttagatggaggaggttaggttgagaatttagggagattatagtagtttgagtttgttgtgtagaattttagaggagagggttgtgttgagaaagttttagagaaggtttttttttttgaaggaaatgattgaaggttgtagaatatttattttaaagtagagattggtagattatagttatgggttaaatttggtttttggtttgttttgtaagtaaaattttattggatatagttatatttatttattatttgtttagttatgtttaaaaggtttattttttggttttttatataaaaaatttatttttttttgttttaaagatttgaagggatggtgtttaggggtaggaatgagtaatattggtttttattggttataggtagaaatgttataatttatagggtattaattggaatgtatataaaggatttgttttattaatgtggagtaagtagtttaaagtgattgttgttttaggtttgattgatatattataaaagtaagatttgaaaggattaaattgtttataagtattttaattgattttgagaataaagtttaagaataagaattttttaaatattaataaaaaa

SEQ ID NO: 744 - DNA, 2315 bp, Artificial Sequence
  chemically treated genomic DNA (Homo sapiens)
ttttttgttgatgtttaaaaaatttttatttttgagttttgtttttagaattagttaagatatttgtgaatagtttgatttttttaggttttgtttttatgatgtattagttaggtttagagtaataattattttgggttatttattttatgttagtgaggtgagttttttgtgtgtattttagttagtgttttgtgaattatgatatttttgtttgtggttggtggaaattgatgttatttatttttgtttttgagtattgtttttttagatttttagaataagggaaggtaaattttttgtgtaaagggttagagaataaattttttaggtgtggttgagtgagtaataaatgggtgtggttgtgtttagtgagattttatttgtaaaataggttgaggattagatttggtttgtggttatagtttgttaatttttgttttaggataaatgttttgtagtttttagttattttttttagagagggggattttttttgaggtttttttggtgtagtttttttttttggagttttatatggtggatttgagttgttgtggtttttttggatttttagtttgattttttttatttggggagtttggtagttgtggtttatgatttagaaattttttaggtaatgattgtggtgatggtaggtttgttttgttgtgttttttttttgttgtttgttgttttgaaaattattgttttatattttgtttgtttttggttgtggaagatgtttattattttattttggttgaaattgggagttgtttagttatttaaatttaatttaatttaaatataatttaaaatttaattttttatttgtattaattatattttgtggatttattagttattgaatatgttagaatatttttggaattataggaagttttgtgggtggtattgttttgaggttttttgtttttttttttttttgtgaattgatagttaaagggaaggtttattttttgtagaagagatagttgggtggttatgagaatagtgggaatttggtttggtagtagtagtaaatttgttaggagagattggttagagttttgttttgtttaaagttttttggggttttgttttgtttttgttatttttttagggtttttaattagattatgagtaaatagttttgggaattggtttttttggtatttgtttttgatttagtgggtaagagtgtagttttatgtttaggtagttttattttttttttttttagattgttgaagagttttttgttttgtaaaaatttttttattttggtttttattagtatatggtgtatgtttattattttttttatagttagtgttaggttttttatggggtggttgaatttttaggggatggttttaggtaggaagttttttatgtaggaggtttttttagtttattttttttttttgaggattttaattttttttggttttagtttaaataagtttgtgattttttaaaatgttgtttattagttattttgtttattagttatttatttttatgtttttgatgggttttgttgttgtaggttaggttttttatgattagtggattttgttggttagtttagtttttattggttatgttttatataaattttttttagtttatgtttgtttaaggtgtttttgtttgtaaatatattatgggttgatttatattagttagaatttattttaaattttttttttttgagtagttgatgtttttttttttggaaggtttaggattttttaataggttattttagtttgtatttgtttatttgtgtttagtatattttttgtgttttggttattgatttttggggttattttatgttgagtgtgttttgtttttgtttttttgtgtttggtatagaatttgatatttgatttttttaagttttagtttttttttttgtaaaatggggttggattttagttttattgagatgatttagttaaagtttttaaatatattgttagtatagtgtttgtagtgttggttattattgttaaggtaggtgggtattatttatgaaggtgttatagagatggagttggattatgttttttgttttggatttgtagtgggttgttttgtttaaagttgtgaatatatgtttttggtattggggggagtggggtttttgtatttttttttttttttgatttgaggtatttagggttttaggtttttgttgttagttgtttgatggtgttgtttttatttgaataatttattttaggtgttataggtgtgatgttaataatgtttgtggttaggagattttatgttaggtatag

SEQ ID NO: 745 - DNA, 2696 bp, Artificial Sequence
  chemically treated genomic DNA (Homo sapiens)
aagtttatgtagatttatttttagtagtttatatgataaataaatattgtgtttgatttttaaatattaaattatagtatattatagatagatatagagttattatttaaagtatgatattttaattttaaaaggttttttttgaagaatattataaattttttttttttttaagatttgttgggtaggaaagatgggagaaaatgaattaatgtttatatagaaaggaggataatgggggtaaaaataatagatgaatgtatgggtggatgagagaatggataaaatgataggtggatatgttgattttggatagatgggaaatgagtggatatattaataaatagatatgtgggtggatgggtggagaagaggatggtggatggttgtggttttatgaagagatgtgaaaaaggaagtgtggaatgatggatgagaagttgtatgggaagatgaatagaagaataggtggttgaataaattaaaaggtgtgtggttggatgaatgaatgagtgggatgatagatggatttaagtggttagtggatggataggaggatggatggatgtgagagttttagaaggatataaggaaagatgggtggatagatggatgggtggatggaaggatatttaggaggatgaatgagtatgtgtgtggagagaggtgtttatttatattggtttgaatatatgggttagttgagttaaatgttagttttatgataggttattagtagttttttttgagttgttttgttaagaagttaaaatttatttaagttatgtggatttgttattgaggggaaaaagaatgagttttttttttttttatttggaagatttattaattttttattttttattttttattgtgggtatggaggtattgtgttatttagggtaagattttgttttttttttagttttttttttaggatatttaatattttgtgaaatttagagattttgttttagttggatttagagaaatttagtgggaaaggagaggttaaaggttgaatttaatggtgtaaggttttatggtttggttattttttgttttgatgttgtggggttagtgggagaagaaagttagtgtgtttttgggtgtaggggttagtggggtttggaggtataggtattttgtgatattttaggttttttgatttatgtttttggtagttttgattatttatagttttagtagagtatggggtgggggtagaggggtttgtttgggagggttgttattttttaaaatttttgtgggttgtttagttatagttttttttgtttgggtgtgttttttgtttgttttttttttttgttttaggttattgtttttaattttgaataaaaattgtagttaatttttgaggtagttttattgtttagtggattttagtttttgttaggtttggtttgttatttttgttttgttttttgttggtttttgttttgtgtttagggattttttagttttttttgtttgtgttttttgtttgttttggatattatggataagttttggtggtatgtagtttggggattttgttttgtgttgttgagtttggtgtagattggtgagtgtttgttgtagtttgggtagtaagatgggtgtggggtgtttagtgtggatttggtggtagtttttttggttgagttggttttgggggattggagttaagtgagttgtttgtgaagtgtattgggttttggaaagtagggttgggatttgtgttaaattgttggagaatgtgtttgtggaagtattatttggttgaaagaaaaagagaaagagaagaaagtttgttgggtaggttgttggtgtgtagttttgggtgaggttgttagagttgtagtatatggtagaaagtaattgtttttttggatgtgtatagttgttgtttggattaataggtttttgtgtttaagggtttgttaagttttattgggttgtgtttaggtagggtagagttgggtggggtagagattggggttggaatagggtgagtggttgttattaaggtggttatagaagggattataattttaagtgtgagattagttggtaatgggttttttagaaaggggttttgggtttttttagttttttattgagttttgttttaaagtttatagtttgtagtgttattgttattttagtgttgtggaagtttgaattagttttgtggtgaggttttgggtttttatgagattttagtttgggatagggagtatgaatatgagaggtaattattggattagttgtttggtttttattattttttgtttttgttaattagtgtggggaaattttaatagtaaggtggtttatattttttgtttggtagttttagagtagagagaagagttttgatattagggtaatattagggattttggagttagggttttaatattttatttaaatagggttagtgttttgtggtggttatggaggggaggggttgtgtgtaaggtatattttagtatggtttaattttaagtattttttttttttgtttatgtatgtatagataattatatggttgatttgtttattgttggttaaaattaattttttttttaagaagtgttagttgggttattaagatagtttagtttgtatgtagtaaattttatttagtaaatatttattaatttagttttatgggagtattgagaaattga

SEQ ID NO: 746 - DNA, 2696 bp, Artificial Sequence
  chemically treated genomic DNA (Homo sapiens)
ttaattttttagtatttttgtggaattgggttaataaatatttgttgagtagaatttattgtatgtaggttgagttgttttaatgatttagttggtattttttaaaagaaagattaattttggttagtgataagtaaattggttatgtaattatttgtatatatatagataaagaaagagaatgtttggagttgagttgtgttagaatatattttatatgtagttttttttttttatagttattataaagtattgattttgtttggatgagatattggagttttagttttagggtttttgatgttgttttggtattaaggtttttttttttgttttgaggttgttaggtagggaatataagttattttattgttgagatttttttatattgattggtagaagtaggaggtggtgaggattaagtagttggtttagtggttgttttttatatttatgttttttattttaggttggaattttatggagatttaagattttattgtagagttggtttaagtttttatagtgttaaggtggtagtgatattgtggattgtaagttttggaataaggtttagtggggagttgggagaatttaggatttttttttggaaaatttattgttagttagttttatatttggaattgtgattttttttgtgattattttgataatagttatttgttttgttttagttttagtttttgttttgtttagttttgttttgtttagatatagtttggtggggtttggtgagtttttgggtataggagtttgttagtttagataatgattgtgtgtatttgggagaatggttattttttgttatgtgttgtagttttagtgattttgtttaaaattgtgtgttggtagtttgtttaataaattttttttttttttttttttttttttaattaaatggtgtttttatagatatattttttaatggtttagtgtaaattttagttttgttttttggagtttaatgtattttgtagatagtttatttgattttagttttttagggttgatttagttggaggggttgttgttgggtttgtgttgagtattttgtatttattttgttgtttaggttgtggtgggtatttattgatttgtgttaggtttagtggtatgaggtagagtttttaggttgtgtgttattaaaatttgtttatggtgtttggagtgaatggagggtgtgggtgaaaggagttggaggatttttgggtgtggggtaggggttggtggaggatgggatgaggatggtggattgaatttggtagaggttggggtttgttgggtaatgaggttgttttggaagttggttgtagtttttatttgaggttgaaaatagtgatttaagatggagggagggagtgagtgaaggatatatttaagtaaggggggttgtgattaagtagtttgtagaggttttaagaagtagtagtttttttgggtgggtttttttgtttttgttttgtgttttgttgaggttgtaaataattggggttgttagggatgtgggttggggaatttggagtgttgtggggtgtttgtgtttttgagttttattggtttttgtgtttagagatgtattggttttttttttttgttggttttgtggtgttaggatagaggatgattgaattgtaaaattttgtattattgggtttagtttttggtttttttttttttgttaaatttttttgaatttggttggagtaagatttttgggttttataggatgttggatattttgggagaggagttggagagagggtgaggttttgttttgggtggtgtagtgtttttgtgtttatagtggggagtgaggggtggggagttggtgaattttttaagtggaaagagggagagtttattttttttttttttaataataagtttatatggtttgaatgaattttagttttttggtagaatagtttagggaaagttattgatggtttgttatagggttggtatttggtttagttaatttatgtgtttaagttagtgtgaatgggtatttttttttatatatatgtttatttatttttttaaatatttttttatttgtttatttatttatttatttatttttttttatgtttttttggggtttttatatttatttatttttttgtttatttattaattatttaggtttatttattattttatttatttatttatttaattatatattttttaatttatttaattatttatttttttatttatttttttatataattttttatttattattttatatttttttttttatatttttttataaaattataattatttattatttttttttttatttatttatttatatatttgtttattgatatatttatttattttttatttgtttaagattaatatatttatttattattttatttatttttttatttatttatatgtttatttattatttttgtttttattatttttttttttgtgtaaatattaatttatttttttttattttttttatttagtagattttaaagagaggaagagtttgtaatattttttaggggaagttttttgagattgaaatattatattttgaatgataattttatatttatttataatatattatggtttaatgtttggaaattaaatgtagtatttatttgttatgtgaattattaaaagtaaatttgtatggattt

SEQ ID NO: 747 - DNA, 2251 bp, Artificial Sequence
  chemically treated genomic DNA (Homo sapiens)
ggattttgagttgtttttaggtagttaggagtggttttagtggtagttgtaaattttagtagttgtttgtgttgtttgtggttggggtggagggtagttagagttggggattaaggttttgtgttatttgtgtgtatagttttatatttgaatgttgtttttttgtagatgagattggtgggtattgtaaagttgggatttgtttttgaaggaaaaaaaatagtgagtaagaaatttagtattattttttattgatttattttgttgtattttttgttttttaagtttttgaaagttggtaattttgattttggtgtttaaaaattgatagttattgagattggttttgagaagttgaagatttggtagtttttagattgagtaggataaggtgaaagtaggttggaggtgggtttaggatatttgagggttgattttgggggtttgtgaggttgttattgttgttgttgttataggtgagatggtgttgggttgatgttggggttaatgggtagagaatgtagggatgtggtttttgttgaagagagttaagaagggaagagtgtgttttttaaattgtttttgtaatttgtttttagtgagtattttattgatttagaatttattgagaatagtattagtgagttattttttttttgagatgggttttatttattttggtaatggagtgagttggattgtggggaggaagaggaatgggaaaattagtttataaatattaatgttagtaagagtgtgttgttggtaggatgtattgtgagtttggagattttggtggttgtagttggtaagtggttataatttagaaagtaggattgagttgttttttttgttttattagtgtattgttttttgggtgtgggtttaatattttataagtggtaatttttgtttatggtagttttgttttttttttattatttttagatttagttttgtattttaaggttgtgtattgttagttattattatgtttatttttggggttaatttgtttgtttttttgagttttgattggttgaatagtttagtgattattttggtggtgatgtttatttttggggtggtgggtaatttggtggttattgtggtgttgtgtaagttgtgtaaggagtagaaggagatgattttttatatgttggtatgtgggttggttgttattgatttgttgggtattttgttggtgagtttggtgattattgttatgtatatgaagggttaatggtttgggggttagttgttgtgtgagtatagtatttttattttgtttttttttagtttgtttggttttagtattatttgtgttatgagtgttgagtgttatttggttattaattatgtttatttttatagttattatgtggataagtgattggtgggttttatgttttttgtagtttatgtgtttaatgtgtttttttgtgtgttgtttaatatgggttttggtagtttgtggttgtagtatttagatatttggtgttttattgattggattattaatgtgatggtgtatgttgtttatttttatatgtatgtgggttttagttttttttttatttttgttattgttttttgtaatgtgtttgtgtgtggtgtgttgttttgtatgtattgttagtttatgtgttgtattttgttgggtattgagtagtattatgtggttgtggttgttttggttgttttttggggttattttgttgtttttttagttttgttgtgttttagtgatttttggtgttgttggagtttttgttgtattgtgggtgttgagatttagatggttattttatttattgttatttttttggtggtgtttatttgttttattttgtttgtggtgagtgattggggttggggttttatttggttttttttttgtatttattttttgtgtttattttttgttttttgttttttttttgagtttttggtagtgaatgtgttgtttttaggttggggttgggatttttatattgttttttagagtaggtttaattttttttgaagttttaattttaatgagatttagtaggtgttttgtttttatattttttagtttatgtttttggaagtttgggtttttttttttattgagatagtttttattttttgttgtttgatattggttgagttttttaagaaaattttttgttttttttgttagatgtggaggggagtttgttgtagtgtgatttagtttatttttttgtattgtgaattgtgaattgta

SEQ ID NO: 748 - DNA, 2251 bp, Artificial Sequence
  chemically treated genomic DNA (Homo sapiens)
tgtagtttatagtttatagtatggaggaatgggttaagttatattatagtaggtttttttttatgtttaatagagggggtggggggtttttttggaagatttggttagtgttaggtagtaaggggtaagggttgttttggtggagaaagaaatttaggtttttgggaatataaattgggggatgtaggggtaaagtatttgttaaattttgttagggttgggattttaaagagggttgggtttgttttgagaaatagtgtgggaattttagttttgatttaaaggtgatatgtttattgttaaggatttagagggaaagtagggagtggggaatggatgtgggaggtggatgtgagaaaaaggttgagtagggttttagttttggttatttattatgagtgggatggagtagatgagtattattagggaggtggtaatgagtaagatgattatttggattttggtgtttgtgatgtggtggaagttttggtggtgttgaaagttgttgaggtgtggtaaggttggggaggtagtggggtggttttgggaggtaattgaggtggttgtggttgtgtggtgttgtttggtgtttagtgaggtgtggtgtatgaattggtggtgtatgtggagtagtgtgttgtatataagtatgttgtagaggatggtggtgagaatgaggaaggagttgaagtttgtgtatatgtaggagtaggtggtgtgtgttgttatgttggtggtttagttgatgaagtattaggtgtttgggtattgtagttgtgagttattgagatttatgttgggtagtgtgtaaaagagtatgttggatgtatagattgtaaagagtgtgaggtttgttaattgtttgtttatgtagtggttgtagaaataggtatggttgatggttaggtagtgtttgatatttatggtgtagatgatgttgaggttggataggttgaagaagagtagaatgaaggtgttgtatttgtatagtggttggtttttgggttattggttttttatgtatgtggtgatggttattgggtttattaataaagtgtttaataggttggtgatagttagtttatatattagtgtgtagaaggttgtttttttttgttttttgtgtgatttgtatagtattatgatggttattaggttgtttattattttgaagatgaatattattgttgggatggttattgggttgtttagttggttggggtttaaggaggtggatgaattgattttgggagtggatatgatagtggttggtggtgtgtagttttggagtgtaaggttgggtttggggatggtagaagagagataaagttgttgtgagtggaaattattatttgtaaggtgttagatttgtgtttgagaaatgatatattgataagataaggggagtaatttgattttattttttggattgtagttatttattaattgtggttattaaaatttttaggtttgtgatatgttttgttaatagtatatttttgttgatattaatatttataaattgatttttttatttttttttttttttataatttaatttattttattgttaagatgaataagatttattttaagggaaaagtagtttgttagtgttatttttgatagattttgaattaataaaatgtttattgaaaataagttataaaagtaatttggagagtgtgtttttttttttttggttttttttggtgagggttgtatttttgtgttttttatttgttgattttaatgttagtttaatgttattttatttgtagtggtagtagtggtggtagttttatgagtttttagggttagtttttagatgttttggatttgtttttaatttgtttttattttgttttgtttagtttggaaattgttaaatttttggttttttaaagttggttttagtggttgttgatttttggatattgaggttagagttgttagtttttaaaaatttgggaaataagaggtgtagtgggatgggttagtgaagaatggtgttggattttttatttgttatttttttttttttaaagatgagttttagttttgtagtgtttgttggttttgtttgtgggaggatagtgtttaggtgtgaggttgtgtgtgtaggtggtgtggagttttggtttttagttttggttgttttttgttttagttatgggtagtatgggtggttattggagtttgtggttgttgttgaggttgtttttggttatttgggggtggtttggggttt

SEQ ID NO: 749 - DNA, 2586 bp, Artificial Sequence
  chemically treated genomic DNA (Homo sapiens)
tttgtgtgggtgtgggagtagttttgttgggtgtttgtagttgtgggagttaagttttttttttaggtgtaggtataaaagtttatggtttttgaataatgtggggtagaggtttttttaagtaatgtttaattggttgtttttaattaaggaaagagaggtttttagttttatggtaatttaagtagggtagttttaggttaaaggtattttagaataataagattattttaagaaatggaatgttttattggatatttgaataggttttttgttattggaattggtgtgtattgtattttaattagtatttttgtgtggagggaggtgatttagtttaggaaagttaattatagaaagaggtgatttttgaaaggattgttttagtgttattagaatatatgtgattatattaaaagtttaggtggatatttgtagttagtttggatttggataatttaatattgttggtagaattgaagggaataagttattttaattttattttttgtatgtgtagtgttgagtgagttgggggtgggaggatagtggtttgtttattgtttttttttaaaatttgagatttgaaaatatggaggttttatttgtttttttagtttttgattgttaataaaaaaataaattttgttggttatattttttttttattttaaaatagtaattttatggtttgtattaagttttttagaagtttattttatttgttttgggttagggagggaataatgttaggaaaagttattggtgtttttttatttttgttttttttagggtgtaggatgtgtgggttggtgggtttgtgattttggaatgttttttgttatttttttgtgtgaatttgaaaggattgggaggtgttgagagtagagtttagggttggtgtattttgtggtgttgagtgggtggtgtgtttgggtgtttaggttgggggatttgtagttgttttattgtggaggggaaaatatgtagttggagggtgtgtgttgtgtgggttgtgatttgttattttattggttattttggggtttttttaagtttttaggtagggttgtgagagttttttagagttgaagttttggaggttgatttgtgggtttggttgttatgggaatttggttggtttaaagaagttttttttttgggtatttggaattttagtttagtgtggggtattggggaagtggtgttggggggttgggttgggggattttagttggtagttttggagagggtttatttttggggttgttgggtgaggttggtatgatttttggttttaaaaggaaagtttttgttttttgttttggtgtgagaagttaaagatttattttgagagtggagagagaaatgttattggtaatgttttttttggaaagtttgagaggggttttttggatatattatttagtgtttttaaattagagaagtagtttttttttggtgtttgggtttagaagttgttatttatttagtttatggtttgaaattagtatgggaagtgttggggtaaggttttgttggagattagaggtttgtttgttgggaggagtttttgggggatggggattttatttttttgtttgttttggtttttatttgggatgtttttgtaggagtttagaaagatgatttattatatggttttgggatagagtagtgtgtttaattttgagggaattttgtgtgtttttttgaggttttagttttttaaggtattgttgtttgtttttttttttttagattgaaattggggaagagtgtgggtgtttttttgttttgatgagtttgtttttttaaatgtttattttggttgtattagagtatttgggaaattttgaaaggtgtttaggttttatatagtagtgtttttttatttagtttttgtttttgggtttttttaagagagtttttattttatgttttggtttttttttgatgttgggtttttgaggtaggtatggagtttttttgaaagtagttgtttatttgtgtttttttggtgtaaagttagagtttattttgttgggggaaggggaggtagaaaagattatagttgggaaagtgtgttttttgttttgtttttaaaatatgttttaagattgttattgtgattgttaggagagttattaatgtttaggggttataaaggaatttttgaatttttggttttttttaaatttttaggtttttaaaattttagtgggggttttttggggttgggatttaggttggtattgttgggaggattttgtttagtatttttttattaatattttatgaaggtaggtttttgttttttttggagtttttttttttggaatgtttttaaattttggttaatttatttttttgtgagttattttagggttttgtggtttgggaagagatgtgttaattttgtgggtttgtgtgtagtttttagttgtaaagtgttgtaagtgatttttttgatggttttttttgattgaagagtttgggaattaaagagaaaaaaaataattttatttttaaaagaataagttattattgtggtgatattgtggtggaggattttggtgatggggt

SEQ ID NO: 750 - DNA, 2586 bp, Artificial Sequence
  chemically treated genomic DNA (Homo sapiens)
attttattgttaaagttttttgttatagtattgttgtagtgatgatttgtttttttgaaaataaagttattttttttttttttggtttttgagttttttggttggaaagggttgttaggggggttatttgtagtattttgtggttaaggattgtgtgtagatttgtggagttgatgtgtttttttttgggttatagagttttaggatggtttataggggagtgagttagttagagtttgggaatattttgagaaaagaggttttagagaaggtaggagtttgtttttgtgaaatattaataaagggatgttaggtgaggtttttttagtggtgttagtttgaattttagttttaagagatttttattagggttttaggaatttgggggtttgggaagggttgagggtttagaaatttttttatagtttttagatgttgatagtttttttaataattgtgatgatagttttgaggtatgttttaggaataaggtgaaaagtgtatttttttaattgtgattttttttattttttttttttttaataaagtaaattttaattttatattaaaggggtatagataggtaattgtttttagagggattttgtgtttattttggggatttgatattgaagaaagattgaggtatgaggtagagatttttttgaaaaaatttaaagatagaggttgagtagggagatgttgttgtgtgaggtttgggtattttttagagttttttagatgttttggtgtagttgaagtaggtgtttggggaggtgaatttattggggtaaagaagtgtttatatttttttttagttttggtttagggaaagaagaatggatggtggtgttttggaaagttagggttttagagaggtgtataaagtttttttaaagttgggtgtgttgttttgttttgggattatgtagtggattgtttttttgggtttttatggaggtgttttaggtgggaattagagtaagtaggagaatggggtttttattttttaggggttttttttgataggtaggtttttagtttttgatgaagttttgttttggtgttttttatgttgattttgaattatgggttgagtgagtggtgatttttgagtttaggtattaaagaaaaattatttttttggtttgggggtattaggtagtgtgtttagaagattttttttgaattttttaaagaaaatgttattaataatatttttttttttgtttttaaaataagtttttggttttttgtgttagaataagaagtagaaattttttttttggagttaagaattgtgttggttttatttagtgattttaagggtaggttttttttggagttgttggttgaggttttttaatttagttttttagtgttatttttttgatgttttatattaaattggaattttaggtgtttggaagaaaggtttttttggattaattgggtttttatagtagttagatttataggttagtttttggggttttagttttaggggatttttatagttttatttagaggtttggggagattttaggatgattgatggggtaatggattataatttgtatggtgtatgttttttagttatgtatttttttttttgtggtagggtgattataggttttttggtttgagtgtttgggtgtgttgtttatttagtattgtagagtgtattagttttgaattttgtttttaatattttttagtttttttaagtttgtgtaaggggatggtaggaagtgttttgggattataggtttgttggtttgtatattttgtattttggaaggggtgaggatggaagagtattggtgattttttttagtattgttttttttttggtttagagtaaatgagataaatttttgaagggtttaatataagttatagggttgttattttggaatgaggagaaaatgtagttagtgggatttgtttttttgttggtaattaagagttgggaaaatgaatgggatttttatatttttagattttagattttaaaagggggtaataaatgaattgttgtttttttatttttaatttatttagtattatgtgtataggggatggggttggggtaatttgttttttttagttttgttagtaatgttgaattgtttaaatttgagttggttgtgggtgtttgtttgggtttttggtgtggttatatgtattttaatagtgttaagataatttttttggaggttatttttttttgtagttgatttttttagattgggttgtttttttttatataagagtattggttgaagtatagtatatattaattttaatgatagagaatttgtttgggtgtttagtgagatattttattttttagaatgattttattattttaaagtatttttagtttgaagttgttttgtttgggttgttatagagttggaagtttttttttttttaattagaagtggttaattagatgttgtttggaaaaatttttgttttgtattgtttaagagttataaatttttatgtttgtatttggggagggggtttgatttttgtggttgtgagtgtttagtggggttatttttgtgtttgtgtggg

SEQ ID NO: 751 - DNA, 2553 bp, Artificial Sequence
  chemically treated genomic DNA (Homo sapiens)
ttggttatttttgtttttttttagatttttagagtttttagtgtagttatagaggatgttgttggttttagttttaagaagatgttgttttttttagagggttaagtaagtgggaatttttttttttatttgttttgggttttaggtagggtttttggtgtaaggtttggggttggaagttgatttatttaggtttaggttttggggtagaattgaaattttttggttattgttggttgtagtttgggagtaggttattgttaaagttgtgggtttttttaggatagtttttttatgaggttggttttttatttgttgtttttttatatttggtggttagggatgtggttttgggtagaatgatgattttttatttttgttattatggaagttattgttgttttttagtttagttagttatttgggttgtagagtattttttttatgttttttgggtgtttttttttttttttgttttagtttggttttgttttattttgtttttagggaggggtattttggagtggggttagggtatggtttttttttgagggagtttttttttggttgtttttagggtagttttgtatagttttagtatttggtgtattttttttgatattttttttagggatagttaggtattttgtgtggggtatttaagagagttaggtttgttagtttttagtttttgttagaatgtaggtttgaggggtgaggggtggggtaggggtagggataggaattttggtgtgttttttatttgtaaaggtttattgaggttttgagttttagttattgagttattaagttagtttgggttaggtttgggtgttttgtttgtaatggaggtagagatggggttttggggtagttttgaggatgttgggtgtatagtgggggttttgttggtaggaattatttatgtttttttttgggttaagttttgtggatgtttagtttggggttgtggggagttggtaggttagtggtagatattggtgggtagatttagtgtttggtagaataggtattaaggaagtggtgattggagggaagttaagtgtatttaaatttttgggtgagttattattgttgggttttttatagttgttgaaagtgagtaatagtgatgaaggtttgtgagtttttgtgtgagtgagtgaatggattagtagtagtttttaggttgtggaagagtgttttttttttgggatggggatatttggttatagtaatttttaattttttatttatttattgtttattgtagaggtatgtgggggttttgttttttgtaggtaggagtgaggggtatttttgtgatgtggtatttttgtgattgaggttatgtgtgattggtgtaagggtaggaagtgagttattggtttgtattaggtgtgggggtttttgtgagggtaggatttaaagttggtttggttttttggttgtagtattttttttttttttgaattaggttagagttttgggatgggaggtgttttgtagattattttttttattaatttttgttttttgttttatttttgtggtgatttggtgaattgttggttttttgttgtgtattgagtggggtagtgattttgatgtggtgttttttgttgtttttgttattgttattatttttggtggtttagtttttgtattttttatttttatggaggaatgtattaggtttttttttttggatgtattttttatttatatgtttttaaattttggtattttttgttttttttttatttttatttttttttttaggtttttagataaaggggaagtggttggatttttttaaagggatagtgttttattagtttattgttgaatttttttttttaattttagttttttagttatagttaattagtattagtagatagtttatgagtgatatttatgtaggttttaggttgtggagagttttttgggtaggaaatagtttttaaggttttttattttatttaggttttagttttttttatttgttttttttttagattgtggttttttggagtttggtttttttgtttttgtgtgattgatatatagtatttaaatagtggtagagtgggatggattttttagtttgttttttgtgtgggtttgtattttgatttagatatgtttttttatagtaggatttaggggggtatatgtgtgtttgtgggtttattggggtatttgtatttggtttattttattttttagagagagggttttgttgtgttatttagttggagtgtagtggtgtaattatagtatattgtagtttttaatttttgggtttaagtgattttttttttttagtttttttagtagttgggagtataggatttattgtattttggttaattttttaataattttttaagagatggggttttattgtgttgtttaggttggttttaaatttttggttttaagtgatttttttatttttgttttttgaagtgttgagattataggtatgagttattatgtttattttagattgatatttttatatttgtttattttggttgggtaggg

SEQ ID NO: 752 - DNA, 2553 bp, Artificial Sequence
  chemically treated genomic DNA (Homo sapiens)
ttttgtttagttaggatgaataaatatagaaatgttagtttgggatgggtatggtggtttatgtttgtaattttagtattttaggaggtgaaggtgggaggattatttgaggttagaggtttgaggttagtttgggtaatatagtaagattttattttttaaaaaattattaaaaaattagttaggatatagtgggttttgtatttttagttattagggaggttggggagggaggattgtttgagtttaggagttgaaggttgtagtgtgttatgattatattattgtattttagttgggtgatatagtaagattttttttttaaaaaataaaataaattaaatgtgggtgttttagtgaatttgtaggtatatatgtgtttttttgggttttgttgtgggggggtatgtttgggttagggtatagatttatatagagaataggttagggggtttgttttgttttgttattgtttgggtgttatgtgttggttatatagggatagaagaattaggttttaaagggttataatttaggagagaggtaggtaggaaagattgggatttggatgagatgagggattttaagggttgttttttatttaggaaattttttatagtttggggtttgtatgggtattatttatgggttgtttgttaatgttaattaattgtaattagggaattggggttgaggaggggagtttagtagtaagttggtgggatattgtttttttaagaggatttagttattttttttttgtttgggagtttaggggaaggggtgggagtaaagggggagtagaaaatgttagggtttggaagtatgtgggtgaggggtgtatttaggaagggaggtttggtgtatttttttatgggggtggggaatgtggaggttgggttattggaggtggtggtggtggtaggggtggtaggagatgttatgttagggttattgttttatttggtgtatagtagggggttggtagtttattggattattgtgggggtggggtggaggatggaagttggtgaggggggtggtttatagggtattttttgttttagggttttaatttaatttgaaagggaaaggagtgttgtagttgggaggttaggttgattttgggttttgtttttgtagaagtttttatgtttggtgtagattaatgatttgttttttgtttttatattgattatatatgattttggttataggggtgttatattataggagtgttttttatttttgtttgtaggaagtagggtttttgtatatttttgtagtgggtggtgggtgggtgggggattaggaattgttgtaattaagtgtttttattttggggagggaatgtttttttataatttggaaattgttattggtttatttatttgtttatgtagaaatttataaatttttattattgttgtttatttttagtagttgtgaaagatttggtggtgatgatttatttgagggtttgagtgtatttggtttttttttggttattatttttttgatgtttgttttattagatattaggtttgtttattagtgtttgttattgatttgttagttttttgtggttttaggttgggtatttataaagtttggtttaggagagagtataagtgatttttgttggtgaggtttttgttgtgtatttagtatttttagaattgttttgagattttgtttttgtttttattgtagatagggtatttaggtttggtttaggttgatttggtggtttagtggttggggtttggggttttagtgaatttttgtggatggagagtatgttggagtttttgtttttgtttttgttttgttttttattttttaggtttgtattttggtaggagttagaggttgatgggtttggtttttttgagtgttttatatagagtgtttgattgtttttaagaaggatgttaagggaggtgtgttaggtattgaggttgtgtagagttgttttggggatagttagagaggaatttttttgggggagagttatgttttggttttattttagggtatttttttttgagagtagggtaggataaagttaggttggggtaggagaagggggaggtatttggagggtatgaaaggggtgttttgtagtttaggtggttggttgggttgggagatagtggtggtttttataatgataggagtggagaattattgttttatttagggttatatttttggttattaggtgtgaagaaatagtaggtggaggattggttttatggggagattgttttggaaggatttatagttttggtagtggtttgtttttaggttgtagttgatagtaattaaggagttttagttttgttttagagtttggatttaggtgggttggtttttagttttaggttttatattaggggttttgtttggagtttaggataagtagggagggggatttttatttatttagttttttggaggaagtggtgtttttttggggttgaagttaatagtattttttgtggttatattgggggttttggaggtttaagggagggtaggggtggttag

SEQ ID NO: 753 - DNA, 2365 bp, Artificial Sequence
  chemically treated genomic DNA (Homo sapiens)
gtggttgtggtgggggtgttagttgtaggggtgtttttggtgggtgggagttggtggttttttgttggtgttatgggatttgtatgtttgttttgtgttttttggtttttgagtttataggttgggattttgtttgttagttgtgtgtgttgttgtttaatttttgtaggtgtagagtgtgtggtggtggtgatagagaattttgtttggttgtttaaatatagttttttgtagaaggattttgtgtttggggaaggggaggaatttttttttttttgggtgtttgttttttttgttatggtttggtttttatatttgtttatatttggttgtagtggggtgtttggggggaggggttgaggttgtgttttttgttgttttttgggtgtgggttaggtggggaggaggggggtgttttggttgtgtgtttaggattgttttttagtggttatttgggttttagttttttaggtttggttttgataggtgggtggagtagttagtgtgagatagggaggttggtgtgggtgtgggaatttgatttgtttgggaggtgggggtggggtgggggtgtagtgtgtggggaggggttggtgtttgttttttttttttatttatttagttgagttagggggtttaggggtttttttggtggttagttttgtattgtaggagtgtgggtgtggtgttttagttagtgtgtagggtttgggttttgttgggggtgtttttttgttgttgttttttgtgtgatttgttgtttattagttattatgttggattttgtggttaatgtgtagttggatgggattattttggattttgaaggtgggtgttgggttggttgttgtggttgtggatgtgttggagaggattttgtgggtgggtttggtgtgggatgggggtgtgttgaggggagatgggagtgtgttgaggggagatgggatttttaatttaggtgtttttttgttgagagtgttgtgtgtttttggttttgtgtttgtgttgtttatgtgggggattttgttaggggtatttgtgtagattttgtgtgtttttataggattttgtgtttgttttgtgtattgttgtttgggtttttttttttttattgttgtttgtgtttgttaagtgatagtgatttttttgagggtttgtgaggttgttttggaattttttaggatgtatagttttattttgggaaatttattggttttttttttttggttttttttggtggtttttgggttttgtttggatttggtaatgggatagggaggttgttttttatttttgattgagtggatagttgtgttttgtttgggtggatagttttttttttttttatgttagttttggggttgttaagttgtgtagtttgtgggttgggagtattgaatggatatagtttaggttgtggtagggtttagagtgggatgttttatggtttttatttaggtttggggatatttttatttgttttttagaattgggttgtgggggatagaaggggtttgtgtgtgggtagggagagtattttggtttttttttgtttttggggtttataaagtgtgttgggatttgtggggttgttttgtttaagtttgggtttggtgtttgtgtttttgagtttgtgagtgtgtgtgtttttttgtgtttttttgattgttggtgttggggttttgtgttttgtgtttgtgggagtaaatatagtaggtgaaggggaagtttatataatggtttttagtgttttggggtagggtttttgaggggtgggtttgtttttgttgggatttggagtttttgttttttggagaggtttttaggttgatttgggtagagttttttggtgggttgggagggggaaaggttgtgttgaaatgagtaaattgtttaggtgttaggttaagttgggaggtgattagtttgaggttttttttgttttatggttagaattagggttgatatttgggtgttttgagtttagttgtttatatggtttatttggggttagttttatttgagtgggggaggtggggttttttgggggattagaattttggttggatgttaagtagagtgttagtggttgttttttagggttgggtttgaggagggtgtggggtggtgaagggatgggagggggttgtgatttagtggttattggtgttgtgtagagtgtgagttggaaatattgtagttattttgttagtttagtggtgaaagtttttttttaggttttatttttttgtatttttgttttttagagggaggggaggtttgggtttgtagagttgggagggtttgttgtttttgttttttttttttataatatttttttatttggatatttttgggtatatgt

SEQ ID NO: 754 - DNA, 2365 bp, Artificial Sequence
  chemically treated genomic DNA (Homo sapiens)
gtatgtgtttaaagatgtttagatgaggaggtgttgtgggggaggggggtgggaatagtaagtttttttagttttgtagatttagattttttttttttttgggaagtagggatgtaaagggatagagtttgaaaaagggtttttattattaagttgataaagtaattatgatgtttttagtttatattttgtatagtgttagtggttattggattataatttttttttgtttttttgttgttttatattttttttaggtttagttttgaagaatagttattggtattttgtttggtgtttagttaaagttttggttttttaggaggttttgttttttttatttagatagggttgattttaggtgggttgtgtgggtagttgggtttaggatatttagatgttagttttggttttggttatggagtggggaggattttaggttggttattttttagtttggtttgatatttggatagtttgtttattttaatatagttttttttttttttggtttattagagggttttgtttaagttagtttaggagtttttttgaggggtgggggttttaggttttggtagaggtaggtttgttttttagaagttttgttttagagtgttggagattattgtgtgagttttttttttgtttgttgtatttatttttgtggatgtaggatgtagagttttagtattggtagttaagaggatgtaggaaagtgtatgtatttataggtttagagatgtggatgttagatttaggtttggatagagtagttttgtaagttttaatatattttgtaaattttgaagataggagagagttaaaatattttttttgtttgtatgtaggttttttttgttttttatggtttgattttgggaggtggatgaggatatttttaggtttggatgggggttatgggatattttattttagattttgttatgatttgggttgtgtttgtttggtgtttttggtttatgggttgtataatttggtggttttgaaattggtgtgggggaggggagggttgtttatttgagtaggatgtggttgtttatttagttggaggtgaggaatgatttttttattttgttgttgggtttaagtggggtttgagagttgttggggagagttaaagggaggggattgatggattttttagagtgaaattgtgtgttttggagagttttgaggtagttttgtgagtttttgaggaggttgttgttgtttggtaaatataaataataataaaaggaaggaaatttaggtggtagtgtgtagaatgagtatagggttttgtgagggtgtgtagggtttatgtgggtgtttttaatagggttttttatgtaggtggtgtgggtatggggttgggggtgtgtggtgtttttagtgggagggtgtttggattaggggttttgtttttttttagtgtatttttgtttttttttagtgtatttttgttttgtgttaggtttatttgtagggttttttttagtatgtttgtggttgtagtagttagtttagtatttatttttgaagtttgaaatgattttatttagttgtgtgttgattgtggggtttgatatgatggttggtgggtagtgggttgtgtggagggtagtggtgaggaagtgtttttggtggggtttgggttttgtgtgttggttggggtgttgtgtttgtgtttttgtagtgtagagttagttgttggaggagtttttaggttttttggtttagttgaatgaatgggggaggaaggtgggtgttggtttttttttgtgtgttgtgtttttgttttgtttttgttttttgggtggattaggtttttgtatttgtattggtttttttgttttgtattggttgttttgtttgtttgttaaggttaggtttggggggttggggtttgagtggttgttgggggatagttttgggtatatgattggagtgttttttttttttttgtttggtttgtgtttaggggatggtgagagatgtggttttagtttttttttttgggtgttttgttgtggttagatgtgggtggatgtggaggttgggttatggtgaggagggtgggtgtttagaggggaagagatttttttttttttttgggtgtagggtttttttgtaggaggttgtatttgggtagttaaataaagttttttgttattgttgttgtgtgttttgtgtttgtaagggttaaatggtagtgtatgtggttggtaggtaggattttggtttgtgggtttaagagttgaggggtgtagggtgaatatgtgagttttatggtattagtgagaggttattaatttttatttattgagggtatttttgtagttaatatttttattatgattat

SEQ ID NO: 755 - DNA, 2367 bp, Artificial Sequence
  chemically treated genomic DNA (Homo sapiens)
gatgtgtgtggtggtaagtgtttggtttgtattttttttgtattttgtaattttgattttggtggtttttagatttggtgaaattgtgaagttttggttttaggagttttttagatttatggttttagatttgaatttttagatttgtttgatttttttttatgttgttttggggatttttttttattttttgttttatgatttaaaatataggtttataggttttagagatattttgtgaatttttttttggggtgttttgaattgtgattgtagatttgtgtttttagttttagtggggaattttattgtttgggaatttagagtttatagttatgattttagatttgagtttatagagttagaggtgatattggaattttgttgttgggaatatttaaatttttaagtttatatttgggattttttaaattttgttttggggttttttaggttgtggatgtttgttttgtgtttatgatttgttaaggatttttatatttaggttgggttttggattttatattttagtgtttagatatgttgggaatgttttatgttaatttggggtttttattaagagaatttttattagatttgtatttttttttttatgtgtgtatttagtttaggtttttttaagttttatgggtgttttttagatttgaggaggttgtaaatttgattttttatatttgttttatttatttgtggataatttgtttttgtaaatttagatttttatttggaggttttagattttttttaggtttagttgttggaaatgtgtgtttgaagggagggtgtgggtttaggggtgaagtatttattggtttttttttttttttttagtagtgagttgtagttatgtttttggttaatttgtttttgaagggtggtggtggtggtggtgggggaggtgggggtttgggtgggggtttgggaaatgtgtttggaggtttgattagtggggttgggggtggtggtggtggtggtggtggtggtggtggtggtggaggtggtggtggtggtggaatggttatgtgtattttaggtggagttattagtgttattaggtaaggtggagattattagaggggtggggtttgggaatgggaggagttttagtgaggtgtggtttgggaggggtgtggtttaaaaatagaataggattaatttggaggttaatttgggtatatgaattaggttggggaggtttggtttgagagttttgttgtaagggggtggattttagtgaggtggatattagttattgggggtggtgtttgatatgggagtagtttgattgtgtgggattaggataatgtggttttgaggggattgatgtggagttttggtgggtggggtttatgggtttgggtttagtttgtattggttaatttggagatgaatgttaaaggtgtggagttaatgtgtttgagtgatattttatggaaggggtttgatttatgagtgtggttagaggttttaggtgggttaatgaggaggtgagtttaggaggaagtaagatttaatggggtagggtaaatggtttagaatgggttgggtttgttgggaattggttggattaatggagaaaaatgttttggtagggatagggtaggttggtttaattagttatggttatttagtagtgattttttgaaggggtggggattaatggttggggtaggatgttgggaagatgggtatttaggaagtgggttatggagtagggttttgggtagatggtatttgaggaggataaggttttgggaagttggggtagagtttttatgaagtgagttttttaaggggtggggttttttgattttatgtgggattttttaggtttagggtggttaagatgattgaaatttgttattgggtaggtgtgtttggtaggaggggagttttttaggggattggtttttgggtttttttgagggtggggttggtttgaggaagggagaagaggggtatgattagggtagtgtggattgggatagatgaggataagaataaatgaaaggtatagtaattaagtaaggaagataatggttggggtttggagtgttggggttgatggttttgtagtgttgtttgttggaggttttgtttttggtattaattttttttttttatttttttgtagtgaggtggttgtgtagtataatttggagtttttggtaagttttttttgtaattagattttttttttttgttaaggtttttttgaggttttatttttgtttttgtagagaagttttattttttttttttttttgtgaaatttttttgttagttttttttatgttgtgtttgtagttttgttatgggttttagttatgttttatatatgtgtat

SEQ ID NO: 756 - DNA, 2367 bp, Artificial Sequence
  chemically treated genomic DNA (Homo sapiens)
gtgtatgtatgtggggtatggttaagatttatggtgaagttgtagatatggtatgggaggaattggtagaggaattttataagaaggggaggaaggtggggtttttttataggaatagggatgggattttgaagaggttttggtaggagaagggggtttggttgtagagggggtttattgggggttttgggttgtattgtgtagttgttttgttgtgaagagataagggggaggggttagtgttaggggtggggtttttaatgggtagtattatagaattattagttttaatgttttagattttagttgttattttttttatttggttgttgtgttttttatttgtttttgtttttatttgttttaatttatattgttttggttgtgtttttttttttttttttttaggttaattttatttttgaggaaatttagagattggttttttgggaggttttttttttgttaggtatatttatttagtggtagattttagttattttggttattttaaatttaaaaaattttatgtagaattaaaagattttgttttttggagggtttattttatagaggttttgttttagttttttaaggttttattttttttaggtgttatttgtttaagattttattttatggtttgttttttaaatgtttgtttttttaatattttattttagttattggtttttgtttttttaagggattattgttaagtggttgtggttaattaagttaatttgttttatttttattagggtatttttttttattaatttagttagtttttagtaagtttagtttattttgggttatttattttattttattaggttttgtttttttttgggtttatttttttattaatttatttaaaatttttgattatatttataagttaagttttttttgtaaaatgttatttagatgtattggttttgtatttttaatgtttatttttaggttagttaatgtaggttgagtttagatttataagttttatttgttaaaattttatattagtttttttaggattatattgttttggttttatataattagattatttttatattaagtattgtttttaatgattgatatttgttttattggggtttatttttttatagtagaatttttaaattaggtttttttggtttaatttatgtatttaggttagtttttaggttaattttattttatttttagattatgttttttttagattatgttttattgaggttttttttatttttaggttttgtttttttgatagtttttgttttatttgatggtgttgatgattttgtttaggatgtgtatggttgttttattgttattgttgtttttattattgttgttgttgttgttgttgttgttgttgtttttggttttgttgattaggtttttaagtatattttttaggtttttatttaggtttttgttttttttgttgttgttgttgttgttttttaagaatgagttaattaggaatatggttgtgatttattgttggggggaaaaaaggggattagtgggtgttttgtttttgagtttatattttttttttaaatatgtatttttggtagttggatttgggaggaatttgaagtttttgggtgggggtttgagtttgtgagggtgggttgtttgtggatgggtggggtaggtatgggggattaggtttgtaatttttttaggtttaaaaggtatttgtggggtttgagggagtttggattgggtgtatgtgtgaaggggagggtgtagatttggtgggggtttttttggtggggattttaagttggtgtaaggtgtttttgatatgtttgggtgttagaatgtgagatttagagtttagtttgaatgtagaggtttttggtaggttatgggtgtggagtaaatatttatggtttaaagggttttagggtggggtttaggaaattttaaatgtgggtttgagaatttaggtatttttagtggtaggattttagtgttatttttggttttgtgggtttgggtttaagattgtggttgtgagttttgggtttttggataatggggttttttgttggaattgggggtatagatttatgattgtggtttaggatattttaaggaagaatttatagggtatttttgaaatttatgggtttgtattttggattatgagatagagggtggagaagggtttttgggatggtataaaaggagattgaataggtttgagggtttgaatttgagattatggatttggggggtttttgaggttgagattttatggttttgttgggtttgggggttgttaaagttggagttgtggggtgtggagggggtatgggttgggtgtttattgttgtatatgtt

SEQ ID NO: 757 - DNA, 2804 bp, Artificial Sequence
  chemically treated genomic DNA (Homo sapiens)
ttaaggtttgttggatttgaggttgtttggggtgttaaatagatttatttatgagtatatttggttaatatatttaagtttaatagtgggtgggatttttggttggttttgattttttttatagtgtgtgtaaatgggtatttattagattttttttgtttgtttttttatttgtaaattttgaaaggagagtattttttggggtgattttgaaaattatgttagaattgaaaaggtttgtgtaaatgtgaggtgtaatgatgatttattagaagtagttagttttgtatgtgtttgtaggatagatgttagaatgttttataaatgtgtgtatatatatattatgtatgtgtgaaggtgtatatttgtttttagatatttgataaatgtatatatgtatgtgtgtatttttggttgagagtaaaggggttaatatagggtttatataggatattattttgtagttttgtgtgtgtatagtatatatgtgagtatgattgtttgtgtttggagatattgtatggtattggaggagttgtttagttgttggtgttatttgggaagtagggttttgggtgttgttttggagtgtgggaaagtttggatttgggtttgttggttagtgttttggtgttgttgggtttttttattttttatttgttggttggtgagtggttttagttttaagatttttgattttgttggtgaggggagggagtgagaaggagtgtgttttgggtttaagaggttgtagggttttattttttaggtttgttgttttttttttatttttttaggttatatttttatttaaaataaagaagggtgtttgatttatttaggttagggaagttggtttttgggagttttttgtttttataagttatggtgaagggaggtgaagttagggtttgttatggtttgggagaaaatgtggttgtagggtttttttgggttgtagtgttggtttggggttttaagattgttaaggtgtgtgtgggaggtgtgtagtgtggttattgaagagttttttattattgtattggtaggttgttgggtttgttttttttttatgtttttaagggttttgagttgtgtagtatttgtattatttagaagtgtttgtggagaaaatgattttaggtgtaagtttaaggttgttgtttgtaaaggtaatgttgtggagattgggttttatagtgatttgggtttttaagttattgaaagttatagggtagggttataaatatttttttgttttttttgtagaattgtgtggttgataggagagtgttgtgtagaaaatttgaggttgggtgttggaggagtttttgtggtttggagaaggtatagaggtgtttttgagaggtgtagttggaataggtgatgtatgggtttggatttggttggttaattgagtttagtggttgtgaaaattagagttgttatagaggttgagtatgattttatttttggggattgggtttggtggggagttattgtttttaatgtttttagagattttaagtaggataatataatgttggtaggagtaaggtgtaaggaatttagtggtagaagttttttgggggggtggggaaaggtagatttgtgttttgtttgagtttgggggtggggatagtttttggttttgtagtttttgttttggggattagttgggtttatttaatttttttatatggggttgaaaggggttaatgggatggttttgttgttttttttttgggattttatagggttttgatttggtttttatttttgtatggttagtagttgtgggggttttaggaaggaggataaaggtttggtgttattgtgggtgggggtttggttttttggttttttgtttatatttatagtttttagtggttgttgggggaagatttttaaaaatatgtgttgaatttttttttttttttttttagaaataaataaataaaaaaggtaaaaggtgaatttttttttattttttgtttatagagattaaagttttttgggattttgttttttttttttttttgattgtttagaaatatttgtttttttttgtatatagaggaaaatgtggggaaaggttttttaaaatttggttttatattattattattattaaggataattgggtaggttgaggttttaatgtggatgatttgagttggttttgtgttggggttttgtagttattgttttgtgtgtttagtatttttgggggtgattagggtttttgtgtttttgtttgttgtttggtagttgagagtattttgtgtttagattggttgatttatttttttttgaattttgtttagagttggtaagggggatttagtttgtgttttaagatttgggtttgtagtgttgttaataggtttggggatatgaggtgttttaggttggggtttttttggttgttggttttttttgttttttatttgttggtggtgttttggttgtttgtaattgatttaatttgttttttgtgtttgttttttaggttttttgtttttttataaaggtttaggggagttttgtttataggttgattttgtaatttttggtttggtggttattttttgtttttttgaaaaagaaaaggaaaaaaaaaaaaaaaaagaaaaaattaattagttgagggaggtgtgtgaggattggaggtgttagttggatagtttatgagtaggtttttgggttggtgttgttttgtgggttagtatggttttttttagagaaaattttttaaatgtgtgaagattgttttgggggaagtgagagggaggttggaggag

SEQ ID NO: 758 - DNA, 2804 bp, Artificial Sequence
  chemically treated genomic DNA (Homo sapiens)
tttttttaattttttttttgttttttttaaagtggtttttatatgtttaggaggttttttttgagaaaggttgtgttgatttgtgaagtggtattgatttagggatttatttataggttgtttggttggtgtttttagtttttatgtgttttttttgattggttgatttttttttttttttttttttttttttttttttttttagaaaagtagaaggtagttattgggttagaggttgtagggttagtttgtgggtgaggtttttttaggtttttgtggagaaatgggaaatttgaggggtaaatgtaggaagtgggttgggttaattgtgggtgattgaggtgttgttagtgggtggggagtgagaggggttagtagttgggaagattttggtttggagtgttttgtgtttttgggtttgttggtggtgttgtaagtttaggttttggggtgtgagttaagttttttttgttagttttaaataaaatttgggggagaatgagttggttagtttgggtatagggtgtttttgattgttgggtggtgggtggaagtgtaggggttttgattgtttttagaggtgttgagtgtatagggtagtggttgtagagttttggtgtgaggttaatttggattatttatgttgggattttagtttgtttggttgtttttagtaataataatagtatgaaattgagttttaaaaaatttttttttgtatttttttttatgtataagggagaataagtatttttaggtagttaaagaaaaaaaaagggtaggattttaggaaattttaatttttatggatgaggagtgaaggggaatttgttttttgttttttttgtttgtttgtttttagaagagaaaaaaaggaaatttgatatatatttttaaaaatttttttttaataattgttaaaggttgtgagtgtgagtagagagttaggaaattgagtttttgtttgtggtgatattgggtttttgtttttttttttgaagtttttgtgattgttgattgtgtagagataaaggttgggttagggttttgtggaattttgagggaggggtggtggggttgttttattggttttttttaattttatgtaggggggttaggtgggtttagttgatttttggaataggggttataaggttaggggttgtttttatttttaggtttagatgaggtatggatttgtttttttttatttttttgaaaggtttttgttgttaaattttttgtattttgtttttattagtattatattgttttatttaaagtttttggaggtgttagggatagtggttttttattggatttgatttttagaaatggaattgtgtttaatttttgtggtgattttggtttttgtgattgttgggtttggttggttggttagatttgaatttgtgtattgtttgttttagttgtgttttttaggggtgtttttgtgttttttttgggttgtggagatttttttagtgtttggttttgaattttttgtgtaatgtttttttgttagttgtatggttttgtagagaaggtgggagagtgtttgtgattttgttttgtagtttttggtgatttaaaaatttaggttgttgtggaatttagtttttatggtattgtttttgtaggtagtagttttgggtttatatttgaggttgttttttttatagatatttttgggtgatgtgagtgttgtgtagtttagaatttttggaagtatgagaggaggatgagtttggtggtttgttggtgtggtgatggagggttttttggtagttatattgtgtgttttttatatatattttaatagttttggggttttgggttagtgttgtagtttaaagagattttgtagttgtatttttttttaggttgtggtaaattttggttttgtttttttttattatggtttgtgagggtaggaggtttttgggggttgatttttttgatttgaatgagttaggtatttttttttattttaagtgggggtgtgatttgaggagataaaggaaggatgatagatttggggagtggggttttgtagttttttgggtttggagtgtatttttttttgttttttttttttattggtaggattgggggttttgaaattggagttgtttattggttggtggatgagagataaaggagtttggtggtgttgaagtgttgattagtagatttggatttggatttttttgtgttttagagtagtatttgaaattttattttttaggtggtattgatggttgagtagtttttttggtgttatatggtgtttttaggtatagatagttgtgtttgtgtgtgtattgtgtatgtataagattgtaggatgatgttttgtatgagttttgtattagtttttttgtttttagttagaggtatatgtatatgtgtgtgtatttgttaagtgtttagggataggtgtgtatttttatatatatgtgatgtgtatgtgtatatatttgtagaatgttttagtatttattttataggtatgtatagggttggttgtttttaataagttattattatattttgtatttatataggtttttttagttttggtatgatttttagaattattttgggaaatattttttttttaaagtttatagatgaggaaataagtaaaaagaatttaatgggtatttgtttgtatatattgtgagagagattgaggttagttaaagattttgtttattgttgaatttgggtgtgttggttgaatgtgtttatagatgggtttgtttagtgttttaggtgattttaggtttggtgggttttgg

SEQ ID NO: 759 - DNA, 2383 bp, Artificial Sequence
  chemically treated genomic DNA (Homo sapiens)
ataataaagatgtatatatgtatgtttttataaaatttagttgagattttatttttattttataaatattttatttaatagtgtatgaatttaattgtagataaagagatagaaatagaaatgaaggaattttttaatttttgattatagttagagagatatttttttaaaggaattttttaaggataaatgtatattaaattaagtagaagatattaagatttggagtggtttttttatttttttttataattaggttgattaaggtgtgagttgattttggtataatgtatttattttaagtttgatgatgtgtttattattttaaaaggtttttttgtgttttttgtagttagttttgttttttttttgaggttagtagttaatgatgtagtttttgttattatataggttagttttaattgttgtagaaatttattttgatggtgttatatagggtgtattttttttattatttggtataatgtttttgagatgatttatgttattttatgtttttgtaatgtgttttattttattgttgggtagtttgggtagttggggtagattgtagtatattttggtgataggtgagattgtggttttgatttgtaggttttggtgaatatgagtaagggtatttgggtgttgggagagatttttttttttttatagaaagtaagtgtgttatgttaataattgaatggggattttgtttttattttaaagaatagtatttgattgtgtagttttttttttggttttaggaggtgagaatatattttttgttagtatagatattttataaatttttgtggaggttgtggttagaagtagaggttgtgtgaagggtgattttgggggttatgaaaaaatatgaaggtttttatagagtatgagaatttaaaagattggagattatgaagtgatttgtaaaaagtagttttaagtagaaagggaagagaagagttttgtggttatttagtgttaaaagagtttatggtggtggagaggataatatgttattttttgttttttattattgtgattgtaaggagaatatttaatatgttatttaagttataaaattgtagttttaagaataatttttataggggagtttatttttttattataaaaatttaggggaaagtgtggatgtagttttttattattataaattatgtagttgagttttttatatttggggaaattgtaggggttagtatatttggagtgtaatggataagttttgttttgggaaaattatttttgtgattatggtattttttttgttaggtaagtatgattttatatatttttgttttgttatagttttatatattttattttttatatatatggttatttgttttgtgtatttttgagtttttttagttttgatatatagttgggatttttaggtttgattagtggttttgaatttgtttttatggtatgggagtttttttgtggtgaaatagttagtggtgaagtagtagtttttgtgttgttttatttatatagaagttgttttatttgtgatgttattgatagtgttttttttgttttggtttgtttttttgttttattttttgttatttagttgattaatatggtgttagagtttgtgggggtagtgatgtttgtttttgtttttttttttttttttttttgtttatggttttttttaaagaagtgggtgtttttgttgtagttttttgtttgttttttgttttgtgttgttttgttttgttgtttaggttggagtgtagttgtatgattttggttttttgtaatttttgttttttgggttgaagtgatttttttgttttaggtttttgtatagttgggattataggtatatgttattaagtttggttaatttttgtgtttttagtagagatggggttttattatgttggttaggttgattttgaatttttgattttaggtaatttgttgattttggttttttaaagtgttgagattataggtgtgagttattatgattgtttagaagttggtttttagtttgtgttgttgaggatttttttggtagaaatttggagtttgtttatttttttttaaataatggtttgtaatgtgtagattaaaatatggaggattatataagaaattggtttattttatattattatttttgtgatgtagtattttatttgaaattggaagttgtttgatattagagaaattatatttatgaaattagagaggttgtttagatgattgtaaattagttatttttatttgttttattattagtagtgttataaggatggtggtttaattttaggaattttgtagggtttttttaaatatagtaatgtataaatatgttgttttagtagagtatattgga

SEQ ID NO: 760 - DNA, 2383 bp, Artificial Sequence
  chemically treated genomic DNA (Homo sapiens)
tttagtgtgttttgttggggtagtatatttgtatattgttgtatttgaaagaattttataagatttttgaaattggattattgtttttataatattattagtggtaaaataagtaaggatggttggtttgtagttatttgagtagtttttttagttttatagatatggtttttttgatattgaatggtttttaattttaagtagaatgttatattataaggataatgatgtgaagtgaattagttttttgtgtaattttttatgttttagtttgtgtattataagttattatttgaagaagggtggataggttttagatttttgttaaagaggtttttggtaatataggttaagaattggtttttgggtagttgtgatggtttatgtttgtaattttagtattttgggaggttgaggttggtggattatttgaggttaggagtttgggattagtttggttaatatggtgaaattttgtttttattaaaaatataaaaattagttgggtttggtggtgtgtgtttgtaattttagttatgtggaagtttgaggtaggagaattgttttaatttgagaggtggaggttgtagggagttgagattatgtgattgtattttagtttgggtgatagagtgagatggtgtaaaataaaaaataaataaaaaattataatagaaatatttgtttttttggggaagattatgggtggggaagagagggaaaggaggtagaggtagatattattgtttttgtaggttttggtattatgttggttggttgagtggtggagggtggggtagaaaagtagattgggatgaggaaggtgttgttggtgatattatggatagggtgatttttatgtagatgaggtagtgtaggggttgttgttttgttattggttgttttattatgaaggagtttttgtgttgtgggagtgggtttaggattgttggttggatttgagggttttagttgtgtgttagggttaggaaggtttgggggtgtgtggggtaagtgattatgtgtgtaaagggtgaggtatatggagttgtgatagggtagaagtgtgtgaagttatatttatttggtaggggagatattatgattatgaaggtggtttttttagggtgaggtttatttattgtattttggatgtgttgatttttgtgatttttttaaatgtgggaaatttgattgtataatttgtggtagtgggggattgtgtttgtgtttttttttgaatttttgtaatgaaaaaatagatttttttataagggttatttttaaaattgtagttttgtggtttgggtggtatgttaagtgttttttttatagttgtaatgatgggaaatagaaagtaatgtgttattttttttgttgttgtgagtttttttaatattaagtggttgtagggttttttttttttttttttatttggggttgttttttgtagattgttttatagtttttagttttttgggtttttatgttttgtgaaaatttttgtgtttttttatagtttttagagttattttttatatagtttttgtttttaattgtagtttttgtaggagtttgtaggatgtttgtgttagtggggaatgtgtttttattttttagagttagggaagaaattatgtagttgggtgttgttttttgggatgaaagtagggtttttgtttggttgttaatataatatgtttgttttttgtaggggaagggaggttttttttggtgtttaggtgtttttgtttatgtttattgaggtttgtaggttagaattgtagttttatttgttgttagaatgtgttgtgatttattttaattatttgaattatttagtaataaaataggatatattatggaaatatgaaatagtgtggattattttaaaaatattatgttgagtgatgaaaagagtgtattttgtgtggtgttattaaggtgaatttttataatagttaaaattaatttgtatagtgatagaaattatattattgattgttggttttagggggagggtggaattgattgtaaagggtataagaggattttttagagtaatagatatgttattaaatttgaaatggatgtattgtattaaagttaatttatattttaattaatttgattgtaaaagggaataagaaaattattttaaattttaatgttttttatttaatttagtgtatgtttatttttagaagatttttttagaaaaatatttttttaattgtaattgggagttgaggaatttttttgtttttgtttttgtttttttgtttgtagttaagtttatgtattattaaatggaatgtttgtaaaataaaaatagagttttagttaaattttataaaagtatatatatatgtgtttttattat

SEQ ID NO: 761 - DNA, 2417 bp, Artificial Sequence
  chemically treated genomic DNA (Homo sapiens)
aggtaatttgtttattttagttttttaaagtgttaggtttataggtatttgatattgtatttggttaatttttggtatttttagtagagatatggttttattttgttggttaggatggttttttaatttttgattttgtgataggtttgttttgattttttaaagtgttgggattataagtgtgagttattatgtttggttttaggaaatttggatttttaatgtggtatttttaaattttgaaattttggtaattaatgtaatttttagaagattgtgggttaggtagattgtattttatggaggtagaaaaggaggtttgaggttgggtttggtggtttatgtttgtaattttagtattttgggaggttgaggtgggtagattatgagattaggagtttgagattagtttggttaatatggtgaaattttatttttattaaaaatataaaaattagttgggtgtggtggtagtgtttgtagttttagttatttgggaggttgaggtagaagaattgtttgaatttgtgaggtggaggttgtagtgagttgagattgtgtttttgtatggtagtttgggtggtagagtgtgattgttttaaaaataaataaataaaaaattagttgggtgtggtggtgtatgtttgtaatttagttatttgggaggttgaggtaggagagttgtttgaatttaggaggtggaggttgaggtgagttgagattgtgttattgtattttagtttgggtaataagagtgaaattttgttttaaaaagaaaagaaaagaaaagaaaaggaggtttgagtttggtgtggtggtttatgtttgtaattttatgtttgggaggttgaggtgggaggattgtttgagtttggaagtttgaggttgtagtgagttattattgtgttattgtattttagtttgggtgataagagtgagattttgtgtttaaaaataagtttaaaaaaaaaaaaaaaaaaaaaaaaaggtttgtaatagagatgtgattttttaaaatgttatataggtaagtgggggttgtatagtttatggtttttagaaagttttttttgggaatgtaaaataatatttattttgggatttttagtttttaaattttttgagtttagaggttttgaagatggattaagtgtaaagtttttgattttatatattgttttttgttttttttgtattatattttttattttttgagtattgtggtttttttgtttttgggattttgttttttgttatttggatggtttgtaaggttattatttgttattttattttatttgggttatgttggttgtaagtttggtttttattttgtatttttggagagttatgtgtagatttttttttatggttttattatatttttttaagataggtagtttaggtttgtgttttttgttgatatttagtattgaggggtagtttttgaggttatgtagatttttttaatttatatgtatagattgatttggggaattgtgggagttagttttgtgttggggtagtggtagatttgaggtgtgaggtgtgtatgtgtagtgtggtttttattgtgttattgtgagtttagagtgtatggttggattatgagtatgtttgtgttggtgtttgtgtgtttgtgtatttttttttgtttggtgtgtgttgtagttgttgggattattttggggttgtgttgtttttttagtaagtgtatgtgtgttatggttttagttagtatgtttatgagtagtttttgttgtagttttaggtagttgtttttttttagtaatatttggtttttggattgttgtatttgtgttttttagttttaggtggtttgtgagagtagtggtgattgtgtttttgttagttggtttttagtggtttattgtttgttgtggaatatgaaggtttggttgttgaggtgtatgtatggtgtgttgtaggtgaggtttagtttggtttggtgtgtgttgtggtttagtaggtagaaggtggatagggagggtatgtggtgtagtggtggttgttgtggtgagaagggttgtgagatgtgattggtttaaaattgttgtagtgtttgttataggtggttggtatggtttgtagttgagtatttgaaggttgttagggtgtggattttgtagggtatgtaggtgtttgaaggggagttttgggagtgttggtgatttgtgttgtgtttttgttttgggagtttggatgtttagaatgatgaaggtgagttagggggtgttgttgggagataagagtttgggtgagtagtgtgtttggtataggttgttttttaaattgtgaggttggtggatatgttttagttttgtagttatggttgtggttgtgttttattagttgttggttattgaggagtttgttgttttatgttgtataggtag

SEQ ID NO: 762 - DNA, 2417 bp, Artificial Sequence
  chemically treated genomic DNA (Homo sapiens)
ttgtttgtgtagtgtggaatgatgggttttttggtggttagtagttggtgagatatagttgtagttgtagttgtagggttaagatatgtttgttggttttgtggtttgagaggtggtttgtattaagtatgttgtttatttggatttttgttttttagtagtgttttttggtttgtttttattattttggatatttgggtttttgagataagagtgtagtatgagttgttagtgtttttgaggtttttttttgagtatttgtgtgttttataaggtttatgttttggtaatttttgagtgtttggttatgagttatgttagttgtttgtggtagatgttgtagtagttttgggttgattatattttgtggttttttttgttatggtggttgttattgtgttgtatgttttttttgtttattttttatttgttggattataatatgtgttaggttgagttgggttttgtttatggtgtgttgtgtatgtgttttagtaattaggtttttgtgttttgtggtgggtggtggattattgagagttagttggtgaggatgtggttgttgttgtttttgtggattgtttggggttggaaggtgtaggtgtagtggtttaaaagttaagtgttgttggaggagaataattatttgaagttgtagtaggaattgtttatagatatgttgattgagattatggtgtgtatgtatttgttggagaagtagtgtaattttgaggtgattttgatggttgtggtgtgtgttgggtagaggaagatgtgtaagtgtgtaggtgttagtgtgggtgtgtttatgatttagttgtgtgttttggatttgtagtgatgtaataaaggttgtgttatgtatgtgtgttttatgttttgggtttgttattgttttagtgtgggattggtttttgtggttttttgggttggtttgtgtgtgtgggttggggaggtttgtgtggttttggggattgttttttggtgttgggtgttggtaggggatgtaagtttaagttgtttgttttgggagggtgtgatggggttgtggaggagggtttgtgtgtggttttttgggagtgtggagtggaagttaagtttgtagttgatatggtttagatagggtggagtggtgggtaatggttttgtaggttatttaggtaatggagggtgaagttttggagatggaggaattgtggtgtttagggaatgaagggtgtggtgtggagggagtggaggatggtgtatggggttggggattttgtatttggtttgtttttagggtttttaggtttaggaggtttagaaattagaagttttagggtaagtgttattttatatttttaagagaagttttttggaaattatgggttgtgtggtttttatttgtttgtgtggtattttggagagttgtgtttttgttataggtttttttttttttttttttttttttttaaatttatttttaaatatggggttttgtttttgttatttaggttggagtgtagtggtgtgatgatggtttattgtaattttgagtttttgggtttaagtagtttttttattttagttttttaaatgtgggattataggtgtgagttattgtgttgggtttaggttttttttttttttttttttttttttttttgagatggagttttgtttttgttgtttaggttggagtgtaatggtgtgattttggtttattttaatttttgttttttgggtttaagtgatttttttgttttagttttttaagtagttggattataggtatgtgttattatgtttggttaattttttgtttgtttgtttttgagatagttgtgttttgttgtttaggttgttgtgtaggggtatgattttggtttattgtaatttttattttgtgggtttaaatgatttttttgttttagttttttgagtagttgggattataggtgttgttattatgtttggttaatttttatatttttagtagagatggggttttattatgttggttaggttggttttaaatttttaattttgtgatttgtttgttttggttttttaaagtgttgggattataggtgtgagttattgagtttggttttaggtttttttttttatttttatagaatgtagtttgtttggtttatagttttttaaaaattgtattagttgttaaagttttagaatttggagatattatattaaaaatttagattttttggggttaggtgtggtggtttatgtttgtaattttagtattttgagaggttgaggtgggtttattatgaggttaggagttaaaaggttattttgattaataaggtgaaattatgtttttattaaaaatattaaaaattggttagatgtggtgttgggtgtttgtaagtttagtattttgggaggttgaggtgggtagattgttt

SEQ ID NO: 763 - DNA, 2195 bp, Artificial Sequence
  chemically treated genomic DNA (Homo sapiens)
tgagttttttattttgtgttttttttgtgttttttttattttaaattttagtagtgttgttgttttttttggaaataagtttgttgagtaaaggtggaggaaaattttgggttttttgttttgattggtttttttttgttgagtggggtgaggtagtgattggttgttgggtgttgttagttgttgaggttagagttattgttggggaagtgtagttgggtttgggtgttttggttgttgttgtggttgtttggttagtgtagttgggtgagtttgtgtgggtgttgttgttgtttttgttgttgtttattttgttgtgttgttggtgttgttggttttgtaggtggttgttggggaggggtggttgagagagtggagtatgaggaggtgggggtggtagagaagtgatgttggtgttggggattggggtagtggtagtggagtagtagtatttttgggattttggttgtagtgtttttgtggtttgtgtgttagtttagtggttggagattatgtgttttgtgggtaaggttttgtttggtagtgtttgtgatgtttttgggatggttggtgtggtttttgggggttatgaggtgtgtggtggttggggtattttgatgaaggtgttgggatttggattgtgtgttttgatgttgggttgtgttattgtttgtgtttgtgtggttttagttggtgtgtttttttttttgtgtttatagattttgatagtgtggggatggtattgtgtgagtgtggatgtggatgtgtgtgtgtgtgtgtgtggtttggggtattttgtagtgagaatagtgggttttttttgtgtggtttgatgttttttaaggatttaagttgggttggagtgagtaggatgttgttggtttggtgggaggtagaatgtatggagtgtatgggaaagtttattgtggtttgtaaagagttgagtaaattgaattttattgtggtgattaaaaggagttgtggatttggtgtgttaggggagaggtgtgttttatgaggttttttaaagttttattttgttttggggattttggaggggaagggaagagagggaaaagtaattgttggtttatattgttgaagaaaaggaggaaagagaagttgggggtgggggtgggggtggaggttatttttgggggagtggtgatttttaggtgtttgaagttttgtgtgggaggtttgttatatttttttggagtgtagatttgaggatggagagttttattttgaggtattggtagtggttttttttgtttggtggtggtgtagggtgtagtgggatagtttggtggaggtagagtggggttttgatgtttgatggtttggtgtttaggtggggttattgtttttttaggttgttttggtttgttgattttttaggttgagatttggtttggtgtgtttttggtagttgttaaatgtttggtggttttgttttttgataaagtttaggtttgttggggtttggtttattagatttaggatatgttaattatgtagagtaattaggttagggtatttagttgtttttagagtgtttttgttttatattagattattttatttgataaagttgttgagagttttatttgtgttgtaaagttttttgtagaaggtgaattttttgtgttgttgtaaatggatggtgttattgggttagatttgaatttttgtagtttagtgtagtgggttttttatttttgtttaggatgtataaatttatttttggtgattgttttttatgtggttttttgtttttgtgggagtatttgtttaggaaagtttttgaaatattttaatattaaggagttttttttattgttttagatggggtgaggttttggtatttgattggtgttggggttgtagtagggaatggaggtggaatattagttttttgtttgttagttttggtaaaataaaaattggtttaatatagggaggtggattttgaattggggatagtattttttttgttatgtagttttgtaattttttttattagagggattttttgttttaaaataaaataaattataatataataaaaatatttaaaattaaattgtagaaattattttgattgggtttatttttgatttggtaaattagagaaaatgaaagtaaggtatgtaatagaaatgttatagaaaattaggagggagttgtttaaa

SEQ ID NO: 764 - DNA, 2195 bp, Artificial Sequence
  chemically treated genomic DNA (Homo sapiens)
tttggatagtttttttttgattttttatagtatttttattatgtgttttatttttattttttttggtttattaaattagaaatgagtttaattaaagtggtttttgtggtttggttttgggtatttttgttgtgttgtgatttgttttgttttgggataaaagatttttttagtgaaagagattatggagttatataataagaaaaatgttgtttttagtttaagatttgtttttttgtattgagttaatttttgttttattaaagttggtaggtagggagttgatgttttatttttattttttgttgtaattttaatgttagttaagtattggagttttgttttatttgagatagtggggagagttttttagtattgaggtattttaagaatttttttaagtagatatttttatggagataaggagttatatagaaaataattgttaagagtaagtttgtgtgttttgagtagggatggagaatttattgtattgaattatggagatttggatttggtttagtagtattatttatttgtagtagtgtaaagaatttgttttttgtggaaggttttgtagtatgggtggaatttttaatagttttattaaataagataatttaatatgaaataaaaatgttttggaggtagttgggtattttaatttggttattttgtgtggttaatgtgttttaggtttgatggattagattttagtgggtttgaattttgttggaaagtggagttgttaggtatttggtagttgttagaggtgtattaggttgggttttaatttgggaggttagtgggttaaagtggtttggggaggtagtggttttatttggatgttgggttgttgggtgttggagttttgttttgtttttattaagttgttttgttgtgttttatgttgttattaggtaggaggagttgttattagtattttagagtgggattttttatttttaagtttgtgttttagaaaagtgtagtaagttttttatgtggggttttagatatttaaaagttgttatttttttaagagtaatttttatttttatttttatttttaattttttttttttttttttttttagtaatgtggattaatagttattttttttttttttttttttttttttgaagtttttggggtaaagtgggattttggggagttttgtggaatgtgttttttttttggtgtgttaggtttatagttttttttaattattgtaataaagtttaatttgtttggttttttatgagttatggtggatttttttgtgtgttttgtgtgttttattttttgttgagttaatagtattttatttattttagtttagtttgggtttttgaaggatgttgggttatgtagaggggatttattgtttttgttgtaaagtgttttaagttgtgtgtgtgtatatatgtatttatatttatatttatataatgttatttttgtgttgttaaagtttgtgagtgtggaagggagaatgtattagttggagttgtatgggtgtgggtagtagtatagtttagtgttgggatatgtagtttgggttttaatatttttgttgggatgttttggttattatgtgttttgtaatttttaaagattatgttagttgttttgggggtgttgtgggtgttgttggatagaattttatttgtggggtgtgtggtttttggttgttgggttggtgtgtgggttatagggatgttgtagttagggttttgaagatgttgttgttttgttgttgttgttttgatttttggtgttagtattatttttttgttgtttttgtttttttgtgttttgtttttttggttgtttttttttggtggttgtttgtaagattggtagtgttggtggtgtggtggggtgggtagtagtagaggtggtggtggtgtttgtgtgagtttgtttagttgtattagttgagtagttgtggtggtagttgaagtatttgagtttggttgtgtttttttggtgatggttttggttttggtgattgataatgtttggtagttaattgttgttttgttttgtttggtggggggagattaattagagtggaaggtttaaggtttttttttgtttttgtttagtgggtttgtttttgggagaggtagtgatgttgttggggtttgggatgggggaggtgtgggaggggtgtaggatgggggatttg

SEQ ID NO: 765 - DNA, 2463 bp, Artificial Sequence
  chemically treated genomic DNA (Homo sapiens)
tgtatagttttttagtataagtaatagtagtttaattttaagaaaaagatattttaaaggttgtatattaaaagttgttagggatttagttgtttatattttatgaaaagtatagattatatttgtttagttagttgtgtattttaattggttgagaaggtgtgttgggggttgggtttgagggtgagtaaaaggtaagattattagtttgggttgatgtgggggttaaggggagagtagaggaataatttgtaagatttgagttttgaagttttttgggttatggaggttagaaaagggtttgttaaagttaggtttaagttttggtaaggtggaattgggaaaaaaaaaaaagaaagaaaaaaaaaatgaaatttgaaaaaataatagtgagtaggtttttgagttttagtgtttatagtgaagttgttaaatgtagtaggaaagtaggtgtgtgttttttttttttttttgtttttttagagatttgagtttagttttttttttttatttttattttagttgagtttaatggttgtttttgttgtggagttgggttggaagatgttttgtttttttgttgtgtttgttttagggaatttttttgttttattttttttgtttgatgaggggtagtggttgttgttgttatgtgtgttggtagttgttaagtgaggttgtttttgtgatgtggtgatagttaaatggtgtgataggaggagttgtagttgtggttgtagtgtttgtatggagaggtttgaggtggtttttggtgttgtttagagggagtgattagatgaatagtttggtgagggtggtgagaggaagtttgttatgagtgttttagttttttgttgtttttgatgaattggatggaataagttgtgtttttagtaggggttgtgtttttatgaatttttagttgttttttttttttttttttttttttttttttttatttttattttgagttttgttttgttttttttttttgttagaggtggttgtgtttaggtgtggagtttatattggagtgtaatggtgtttaattttgaatggggggagattttgtttatggaattgtaggtaagggttgtggttttggtgagaggtgttggtggaggagatagggagagagttttgtgtggtgttggggattgaggaaagttttgtggttgttgtgtttttagtttgttaagtgtggaaattttgggatgttatttgggaaatgttttttttggggaattgtttttttggggagttggatttttttttttgttaaagttttggtttgttattgttttggtttgattttgtttattagaggggattttatttttgtagttttgttgtagtgggagtttgtttttgtttggtttttggagaggttggtttgttgtttttttttttggtgttagagttatttgtgaatgtttttgttgttttttttttttgtgtggttgggttttgttttgttttttttttgtatattgttttttaaatttttttgaatgatttttaagttgtttttttgtttttttttttttttttagattttgtataaagagtgtttttataatttttagtttttagataagtttttttaaaaaatgagttttattaaatgtttgttttattttagtagttttttttaggtgatagagttttttttttttattttgagggttattttttttttttttttttttttttttttttttttttaattgagtgataaatatagggtgtttttttttgttatttttgtttagatttgggagtttagatgttgatgttttttagatttttatttttttttttatttgagtattagagaaagagttaataagttgtttattaatgagaaagtagttgattaagggaaaatattgggtattatatgtttgtaaaagatgagagtaaagtagattgtttagttaagttatgttgagtagtaatgttattttttatttttagataaatatttgataatgtaggtatgattttttttagatttttatggtgtatatggggatttaagttattttgttgggttttttattatttgggagtgttttagagatgtttgttttttgatttaaaagttattttgttttattttaatatagttattttttagttatttaaagattgtagatgggaattaggagaaaaaaatagtatgtttgtatttttttttgtgtgttggatagttaattttttttaaaaaaaagattaaattaagaaattttgaagagttgatgttaaaattaagtattgtaattgtatttaaattttttgtttaaatatattttttaagaaatttttttataagtttggttttttgtgtagttagatgtaagtttgaaaattttggtataatggttgatattttttttataaaaatagagattttaataatgtatattaatgtagtgttgtatatttagaattttttggtaa

SEQ ID NO: 766 - DNA, 2463 bp, Artificial Sequence
  chemically treated genomic DNA (Homo sapiens)
ttattaaaggattttaaatgtgtaatattgtattgatatatattgttaaagtttttatttttgtggaggaaatattaattattatattaaagtttttaagtttatgtttgattgtataagaaattaaatttataaagagattttttaaaaagtatatttaaataagaaatttagatgtagttgtaatatttaattttgatattaattttttagaattttttgatttagttttttttttaaaaaaaattaattgtttaatatataaaaagaaatgtaggtatgttattttttttttttaatttttatttataatttttgagtagttaaaagataattatattaaaataaagtaaaataatttttaagttaaaaaataaatatttttggaatatttttaagtaatgaaaaatttgatagggtagtttaagtttttatgtatattatagagatttaaagaaaattgtgtttatattattaaatatttatttggaaatgggaaataatattgttatttgatatgatttaattaagtgatttattttgtttttattttttgtagatatgtggtgtttaatgtttttttttagttgattgtttttttattagtaaataatttattagttttttttttggtgtttaaatgagagggaaaatgaaagtttgaaaagtattagtatttgagtttttggatttgggtaggggtagtagagaaaggtattttgtatttattatttggttaaaaaaaaaaaaagaaaggaaaagaaaagaaaaagataatttttaaaatagaggaaagaaattttgttatttgaagagggttgttgaagtgaagtaaatatttggtgagatttgttttttaaaaaaatttgtttaggggttggaagttatgggggtgttttttgtgtggagtttgaggggagggggagggataagaaaatagtttgggagttatttaaaggagtttaaggagtggtgtatggaggaaaggtggggtggggtttggttgtgtgaagggagggggtaataggggtgtttgtgggtagttttgatattgagggagggggtgatgggttggtttttttggggattaggtgagagtaggtttttgttgtagtagggttgtagagatggggttttttttggtaggtagaattaaattaaagtggtggtaggttagggttttggtgggggagagggtttggttttttagggaagtggttttttgagggaagtattttttgagtgatattttggagtttttgtatttagtgggttaggggtgtggtggttgtagggttttttttggtttttgatgttgtgtggggttttttttttgttttttttgttagtgttttttattagggttgtggtttttatttgtagttttgtgagtagaatttttttttgtttggggttggatgttattgtgttttggtatggattttgtatttggatgtggttgtttttggtgaagggagaaggtgggatggggtttggggtgggggtgaggagaggggagagaaagaaaaaaaaaaaaataattagggatttatggaggtgtagtttttgttggaggtgtggtttattttgtttggtttattgagagtggtggggagttagggtatttgtagtgggtttttttttgttgtttttattggattgtttgtttagttgttttttttgggtgatgttaggagttgttttaagtttttttgtgtgggtgttgtggttgtggttgtagttttttttgttgtattatttggttgttattgtgttgtaaaagtggttttatttggtggttgttagtatatgtgatggtggtagttattgttttttattgggtagggaaggtggggtggaggggttttttagggtgaatgtggtgagggggtggggtgttttttgatttgattttgtggtgagggtagttattggatttggttggggtgaaaatgaggggaaaggattgggtttgagtttttggggaggtgggaagaggaagaaaatatatgtttatttttttgttgtgtttaatggttttattgtgaatgttagaatttgggagtttgtttgttgttgtttttttgggttttgttttttttttttttttttttttttttttttagttttattttgttgaaatttgggtttaattttaataggtttttttttaatttttataatttaaagagttttgggatttagattttatagattatttttttgttttttttttgatttttatgttaatttaaattaataattttgttttttgtttatttttaaatttagtttttagtgtgtttttttgattagttaaggtgtatagttagttaaatgggtatggtttgtattttttatgaaatgtaagtggttggatttttggtaatttttaatgtatggtttttaagatgttttttttttgaggttgaattattgttgtttgtattggagaattgtata

SEQ ID NO: 767 - DNA, 2297 bp, Artificial Sequence
  chemically treated genomic DNA (Homo sapiens)
agaaaaatattattgtgtttttttgtttgtatttaatatatttaaggttttttatttatttttttggaataaatttttagtaaatatttatttattgatttgggagtgatggatttttataaaggtttgattgttttttaagtggttgaagtgatttgtttttgtggtttttttagtattgaagggggtgggggaagtggatttgagggggtgtatgtttttgttgttggtgggtttattttttaaaaattattgagatgtgttagggtggttgtgattaagtgggtttagggttaattgtgtgagggggaagtgttttttagagtgtgtgtagtgttgggggtttagtttatgttgttgtgtgtttttgtgtgtattgggtgaggatgttgagttttgtgggtattttggaagttgtggtggaggtaggggttttgtttggtgtagtgggtttgttggggaggtgtaggggaggttttgatttttggtttatttttttttagatttttttgtttgtttttggatttttagggtttttttttaaatttttttttgttttttttatgggaggtttttgtagtttttgggttttagggttttgtaagttttgggattgatttgtgtttggggtgggtgtggtggaagtttgaattggattatttaggtatgttatttgtagatgtagtgggtgagggggattttgttatttttttagttttttttttggattttgtagtgaggggaattaaattttttttatgatagtttttttggtgttagtttggattgagtggttataggttggattagggtaggtagaagatgtatttggtattttattgaatggtatttgaatttgtttttattatttattaatggtgtgattttaggtaatttatttaaattttttgaattttagtggtttttatttataatatgggggttaatgataatgttttttttgtatgtaggtggattaaatggatataaagtgtttatttttgtttggtatgtttaaaatttttattaataggttagttaattttattatgagaggaatttttttttttttgttttttagagtgtgggtggtatgaggttatggaagtagttgttgtaattagtattttaaaatttagagattttttaatggtggtagggggtgaaagggtaggggggaggtagggttgggataggtagaggtaggtttttggggatttttagttttggggattaagtgtttggaattagttgggtttgggtagaaataagaaggtaaatgatgggattgttgttggagtttggatttttatttttggagtttattgttttttttagggaatagaggagtgttttggttttttagtaatgaattaggagagtgtgagaaagagtatttgtttttttttttgtggtttgataagttattttttggtagttttgtgagtagattaattgaaatgggtttggaattttattttttttttttgatggagttgttggaggtttgtggatattgtttggttagtttttgggattatagtgttgtgggtttttttttgtggtgtttgttttaaatttgggtgttattaatttatttaataatgatggatgattttgttataatgatgttagttaaaatatttttggtttaatttttttttaattaatattgaagtattttgaatgagatttggatgaagtttgaatagtatgttttttaggtttagaaaatttgagtggtgggaagagaaaaagaaataagtagaaattaggaaagaatggttattaattgtttagattggtaagtgttaaataagttaggttgtttggaaaaagataaatgttgttttttttttttatggtatggttagaattttggtgatgggaaagtattttttgagttggttaattttatatattttgtttgtgttttttattatttattattgaaaatgttaggaagagttggggggtaagtgttttttttgtgggtgtgagattgtattgaagggttgttttggtataaagtttggggagaggatatggtggaggtggggttgtatttttattttgtttttttaatattaggttttgggtagagaaatttatgtgtgattttttgtggtagttgtaggtagttgattgtaaatagttttgtttgtgttttggagtagttgtgttattagatgtaatattggatatttgtttttgggttttaagaaggagagggaaagagttttttagaagataatttgagaaggggttagtagagtgttgggtggagtgtagatttt

SEQ ID NO: 768 - DNA, 2297 bp, Artificial Sequence
  chemically treated genomic DNA (Homo sapiens)
ggagtttgtattttatttagtgttttgttgatttttttttgggttgttttttggagggtttttttttttttttttttggggtttggagataagtatttagtgttatgtttggtggtataattgttttgggatatgggtgaggttgtttgtggttagttgtttgtggttgttgtaggaggttatgtataggtttttttatttaaaatttggtgttagaggggtagggtgggagtgtagttttatttttattatgttttttttttagattttgtgttagggtagttttttgatgtagttttgtatttatgaaggaggtatttgttttttagttttttttggtatttttggtagtagatggtagagggtataggtagggtgtgtgaaattgattgatttaggaggtatttttttattgttggggttttggttatattgtaaagagaagaaatggtatttatttttttttaaataatttaatttatttagtatttgttaatttgagtaattaatagttatttttttttgatttttgtttgtttttttttttttttttattatttaagttttttgaatttgggaaatgtgttgtttagattttatttgggttttatttaggatgttttgatgttggttggaagagagttagattgaaaatgttttgattggtgttgttatgataaggttatttgttattgttggatagattgatagtatttaagtttaaggtagatattatgagggaaagtttatggtgttgtggttttggaggttaattaggtagtgtttgtagatttttagtaattttattgggaggagaggatgaagttttaggtttgttttaattaatttgtttgtagaattgttgaagagtggtttgttgggttatgggagaagaaataaatgtttttttttatatttttttggtttattgttgagaaattaggatatttttttgttttttgggagagatagtgaattttagggatggaagtttggattttggtggtggttttgttatttgtttttttgtttttgtttaaatttagttagttttaagtgtttggtttttaagattggaagtttttaagaatttatttttatttgttttaattttgttttttttttatttttttattttttgttattattagaaagtttttggattttgaaatgttagttgtagtagttgtttttgtggttttatgttgtttatattttgggaagtggaggagggagggttttttttgtaataagattagttgatttgttaatgagagttttggatgtgttgggtgggggtaggtgttttatgtttatttaatttatttatatgtggagaaggtattattattaatttttatattgtagatggggattgttgaggtttggaaagtttagatgggttgtttaaggttatgttattaatgagtaatggagatggatttaaatattgtttggtaaggtgttaagtgtattttttgtttattttagtttaatttgtagttatttggtttagattgatgttagaggggttattatgggagagatttggttttttttgttgtggggtttagggaagaagttgagaaggtagtaaagttttttttgtttattatgtttataggtggtgtatttgggtaatttgatttaagtttttgttatatttattttgggtataagttgattttgaggtttatgggattttaaggtttagaggttataggaattttttgtgaagggggtaggagaaagtttgagggagagttttgaaggtttgggagtgaatgaaaaagtttggaagggaatagattaggagttaggattttttttgtatttttttagtaggtttattgtgttgagtggggtttttgtttttattgtggtttttgggatgtttgtagagtttggtatttttatttggtgtgtataagggtgtgtagtggtgtaagttggatttttgatgttgtgtgtgttttgaggggtgttttttttttatatagttgattttgggtttgtttggttatggttattttggtgtattttaatagtttttagaaagtgagtttattgatggtaaggatatgtatttttttaaatttgttttttttattttttttaatattgagaagattatggaaataaattattttgattatttagaaagtgattaaatttttataaaaatttattgtttttaaattgatgggtgaatatttgttgggaatttgttttagaggaataaatgaggagttttgagtgtattaaatgtaaatggggggatatggtggtgttttttt

SEQ ID NO: 769 - DNA, 2177 bp, Artificial Sequence
  chemically treated genomic DNA (Homo sapiens)
gtggttaagagtattaatagaggtttatatagtattaatttaagtatttaagttataaattaagataataaattgttaaataaaatatgatttgtttttttattttgataaatattttttatatggagttggatggttagttgtgaattatgaatttttggatttttttaagggttaggttggaaggtgttatggaggataaagttgattgtgaatgatttttttttttgtattatgaggggtttaaagtatttgggagtgtatattttagtttataggtttaggtattgtttatattttaaagaagagttattttttggatataggagtgagtttagagttttgattagattttgaaagtgaatttggtattatttgggtagagtagtttagagttttgattatatggagtgtatgtagtttagaagagggttaggttttagttgggttattagtttgattggaagaggggtattgttagaggagagttagagggtggttgtgggtggaggttttttttgggtttaagagttagtttgattatatagtttttaaaattattttaagaaagaataatatattggaatatttatgtgatgggtaagtatggtttagtggttatgagattaggttttgtaggtaaatttttgggttggaattttaggttggttattttttagttgtggtattgtaggtaaattattgattattttatagttttagtttttttatttttaaaatgggtaaataattattattatgaggagtggtagtatatgtaaaatgtttggtggatattatatattgggtggatgttgatagggttttttttagtttaggtgagtttgtttttgagaggtttttttggagaattatataagttttataatatttaagtattttgatagttaaggtgaaagttttttttttttattaaattggggtgaggtgtgggtgtgggtattatttattttatttaaggtattaggggtagtttatgttttgtttggttttgtgtttaaggattttatgttgtagatgtgtatggaagttgttttggttaggggtttggaggttaattagtaaatgtagtgtgagttatggtggtattaggaattgaaattgtgttagttatgtttaggtttattttttgatgtggatggtgaaattagggagtagtgatattaggatggggagttagtgttgatgtagttttattgtttttttttttattttgtatttgttgttgttgagtttagtttgtagataggttttgatatttttttttagtgaggagtgagggagttggaataagttggggtattttttttgtattttttgggagtgttagtttagttaagtttagtgattgtttggtttgttagtgaagatgttttttttgaagtaagtttggatatttttttatttttttgggtgaaatgaattttaagtggtttattttggttttttgtttttttttattttttgtaaaaaaatttggtaattttgtggttttttgtggattaaaatttgtaattagttttttgtgttttttttaaggggtagttgtgattggaaattgaggagttagatttttttgaaaatattaataaagaattatatttagttttgagtttttagtttaaatgttttttatttttttatttttattttaaaatgttagggttggggaagtgggaggtagagggtgggggagtaatggagaaagaatagttgtgtttttgtttttttgtttaatttttataaataattaattgtgagtggaggttattttttagttaatgaagtgttttaaattgataaagttttggtggtagttaatgaataatatttaggggtgttagatttgtgttttgagattaatgagtgtagagtttgggagaggtaatttgagttagagtgtgggtgtgtggtgtaaaagttttttatttttaagtttaaaaatttgttttgtgattgagtatgttttgaattaattgtgggtgttttgagatttttggattgggatgtaatttggtttttgggttttgattgtatttgagtggggaggtgggtatgatttgtgggattttgttttgagagagttgtaggtattagaagttattttttttttagttggaatagtattttagatttggagtattttttgttttttt

SEQ ID NO: 770 - DNA, 2177 bp, Artificial Sequence
  chemically treated genomic DNA (Homo sapiens)
aagaaaataggaggtattttaagtttgagatattgttttgattaggaaaggggtagtttttggtatttgtagtttttttggggtagggttttgtgggttgtatttatttttttgtttgagtgtggttaaaatttggagattggattatattttaatttagaagttttagggtgtttgtagttagtttagggtatgtttagttgtagagtaggtttttgggtttggaagtaggaagtttttgtattatatatttatattttagtttaaattattttttttagattttgtatttattggttttggggtgtgagtttgatatttttaagtgttgtttattggttgttgttaaggttttattagtttggggtgttttattggttaaaaagtagtttttgtttgtgattggttatttatagagattgagtggagaggtggaggtatagttgttttttttttgttgtttttttattttttgttttttatttttttaattttggtgttttgaagtaaaagtgaaaaaataagaggtatttaggttgagagtttagaattaaatatagttttttgttggtgtttttgagagggtttgattttttggtttttagttatgattgttttttaaagggagtataaagggttaattataggttttggtttgtaagaaattgtagagttgttaagtttttttgtagggagtgggagggggtgaggagttgaaatgggttatttggaatttgttttatttggaggggtaggggagtgtttaagtttgttttagaggaagtgtttttgttggtgggttgggtaattgttagatttggttgggttggtgtttttgggaggtgtaagggagatgttttgatttgttttgatttttttgttttttgttgaggagggatgttaagatttgtttgtaggttgagtttggtggtggtgggtgtgggatggggagggaggtggtggagttgtgttagtgttggttttttgttttgatgttattgttttttggttttattgtttgtattggagggtaaatttgggtatggttaatatggttttagtttttagtgttgttgtgatttatgttgtgtttgttagttaatttttaaatttttggttaaagtagtttttgtgtatgtttgtagtgtgaagtttttgggtatagaattgggtgggatgtgggttgtttttgatgttttgggtggggtgggtggtgtttatatttgtgttttattttaatttagtagagagaggagatttttattttgattgttagagtgtttggatgttatgaagtttatataattttttagaaaaattttttagaggtaaatttgtttaagttggagagaattttgttaatatttatttaatgtgtaatgtttattaagtgttttatatatattgttattttttataataatgattatttatttattttaaagatgaggaaattgaggttgtgagatgattaataatttgtttgtgatgttataattagaaagtggttaatttaagattttaatttagggatttgtttgtagagtttagttttataattattggattatatttatttgttatatgaatgttttggtatgttatttttttttagggtgattttagaggttgtgtgattagattggtttttaaatttaagagggatttttgtttatagttattttttggtttttttttggtagtgttttttttttggttaggttgatggtttagttggagtttgatttttttttagattatatatgttttatgtagttagaattttggattgttttgtttaaatggtgttaagtttatttttaggatttggttgggattttgaatttatttttgtgtttaagaaatagtttttttttggggtgtggatagtatttggatttgtgggttaaggtgtgtatttttaggtgttttgggttttttgtaatgtaggaagagggattatttgtgattagttttattttttatgatattttttagtttggtttttagagaagtttaggaatttatagtttataattggttatttagttttgtgtaggaggtatttgttaaggtgggaggatagattatattttgtttaatagtttgttattttgatttatgatttaaatatttaggttaatgttatgtgggtttttattggtatttttaattat

SEQ ID NO: 771 - DNA, 2590 bp, Artificial Sequence
  chemically treated genomic DNA (Homo sapiens)
gtgttgagtaggtgtggttatggtgtttagattttttgggggtattttagtttttgttatttagtggtttatggttgtgggttttagggtttgaggttggggattattgttgttgttgtagtttttatattttgaagttgttttgttgtttgtgttgtttttgtagatagtatttttggtgttttgtgtgtttttttttttttttttttttttttatttgtttttattgttttgagtttttgaaagttgggagaattggagatatttttgaggattggtaatgaagttttatttaagtgggatgtaatttttgtttttttatttttttttaagaaggaggttgtgtttttattttgttttgttttgggtgttgatttttaaaaaattagagtaaaatgaatgtgaataaaaagaaaaggagaaatgttttgagttggggtagagggagtagagaaggagtttttattgtggttggaatgtagagtggattttggtttaggattgggtttttttttaggtttgggtttattttggtttttgttgttggaatttttaggaggtaaagtgattttgatttttgttgtttgtatttttgggtgtgagtgttttttttaggaggtttaggaggttgtttttgttgtattttgagtttttgttgtaaaaattgaagtttgtgggttttggtaggttttttagtttgtttgttttgggataggtttttgtttatatttttggaagtaaggagttttgggtttttttgttttttttggggtgtggagtttttggggtttttgaaaggtgaggttttagaggtgagggaggggtgagtggggagttttgtttgtttgtggttgtgtttttgttgtggattaggaggtaggttaattttttggattttgggggaaaaattatagtgggttttttgtggaaattttggttgttttaatttgttaagagtttgagtgaggttttggaagtttttagttttggtttaggttgggatgtggttgttgagtttttttaggtttgtaggatagtggtttttgttggtggtgttgttgtatttaggttttttttagattggtggtggtagttaatttgagatttgtgttttttgggtttggggtagttaggaggttggtgtgtagtgggttgggttaggattgggttgagtagatagagttgtagtttttgttttgtttggttttttgtggttggagagtagagtgatgttatttggagttttgtttgggtggtaatgagattttggttagttatttttgtagtttagattaattttttttaatagtttttgatggtaattatagtaattgaagttgttatatatttttaggtaattatgatatataaaaagttttgaggggattttttggtgagggaagttaagaatggttttttagttttaggaaattttggtttgttttatgttggagtttgtttggtttgttaaatgagaggagttttgtaatggggttaattagtttgttttgtgattttaagttattttaatgtggttgggtggtggagtttgaggtataggtttgttatgttttggaatttttgtgttttttttttttgggttttgttttagtttggttgtttgtttttaatttgttttgggagttgtggtttagaggtttgtttagaggtaggatttgtattggtggtggtttagagggtaatagtttggaagtttgggtgggggaatttgaggaggggtttttattttgtattggttttttttttatttttattgggttttttagagatgttgttatgggttttttgtttggatgggaagtggggaaaaagagattttattattgttttttttatttatttattttggtatttttaatagtgttatagggaagaggatagttggggtgatagtattgttgggttttaaatgtggattttggagtggttagagggtgtgtgttaagtagaggatggttgtaagatatggaaattaagtttattgtttttagagtgagtgtagtgtagtggagttttagatttggtttttgagtgattaggaatttttttgggtgtagtgataggtttgaaggagtggaggataagatttgttgtgtttttgtttggttttttttagttttttttttttatagtataatttttttttttgttttgtgggaggggggtgttgagttggtggttgttgtgttgtgtgttttttttgtttgtttttgttgttgtttgaatttttatgttattttttttgatgggttattggtggttttataggtaggtgttgttgtggggttgtaattatttggttgagtttggttgttattgaatatttttttatttttaagtatggttttttgtgtttttttttttttattttttttatttgagatgagtttgggatttatggtgtaagtttgtttggatgttttgggttttaggagtaagtttatatttgtggtgttttgaggttttttttgtgttatgtttttattttttttattttttttgtttagatgttttattgttgtttttttttattttaattttattgtagtttttaatttaagtgtttttg

SEQ ID NO: 772 - DNA, 2590 bp, Artificial Sequence
  chemically treated genomic DNA (Homo sapiens)
tgaaagtgtttgggttggggattatgatgggattgaggtgggaaggggtggtagtggaatgtttgggtgaggggagtaggggaggtgagggtgtggtgtggggagggttttgaggtattgtaggtgtaaatttgtttttggaatttgaggtgtttgggtgagtttgtattgtgggttttagatttgttttaggtggagggggtgggggaaggagagtgtgggggattgtgtttgggggtgagggggtgtttggtaatgattaggtttggttgggtaattataattttgtggtagtatttgtttatagagttattagtgatttgttaaaaagagtagtatgggaatttggatggtgataaaggtgggtaggggaggtgtgtggtgtggtggttattggtttggtgttttttttttatagggtgggaggggagattgtgttgtgggagggaggggttggagagggttaggtaagggtatagtgggttttgttttttatttttttgggtttgttattgtgtttaagggagtttttggttgtttaggaattgggtttggagttttgttgtattgtatttattttggaagtggtaaatttggtttttatattttataattattttttgtttaatatgtgttttttgattgttttagggtttatgtttggggtttagtagtattgttattttagttgtttttttttttgtggtattgttgaagatgttaagatgagtgagtgggaggagtagtggtggggtttttttttttttattttttatttggataggaggtttatgataatatttttggagaatttgatgagggtggagggaagattagtgtagggtgggggtttttttttggatttttttgtttgagtttttggattgttgttttttaggttattattagtgtgagttttgtttttgagtagatttttgagttgtggtttttggggtagattagaaataggtaattgggttggggtggggtttaggagggagggatgtgaaaattttggggtatagtgggtttgtgttttagattttgttatttagttatgttaaggtgatttggggttatgagataagttggttgattttgttgtaaagttttttttatttagtaagttgagtgagttttgatgtgaggtgagttggagttttttgaagttggaaaattgtttttaattttttttgttagggggtttttttggggttttttgtgtgttataattgtttaaagatatatggtagttttgattattgtaattattattagaggttgttgaaagaagttagtttgggttgtaggggtgattggttagggttttgttattatttaggtggggttttgggtgatattgttttgttttttagttgtgagaagttgggtaaggtgggggttgtagttttgtttgtttgatttagttttgatttggtttgttgtgtgttgattttttagttgttttgggtttgagggatgtaagttttgggttggttgttgttattggtttggaaagggtttaaatgtagtggtgttattggtgggggttgttgttttgtgggtttgagaaagtttagtagttgtgttttgatttgagttggggttggaggtttttaaggttttatttaggtttttggtaagttagaatggttaaagtttttgtaaggagtttgttgtggttttttttttaaagtttggagggttggtttgttttttagtttatagtgggggtgtagttgtaggtgggtagagttttttgtttattttttttttgtttttgaggttttattttttaagggttttaggggttttatattttgaaaaggatgaaagagtttggggttttttatttttaggggtgtaggtgagggtttgttttggggtgagtgagttaggaggtttgttgagatttatgggttttagtttttgtaatggaggtttagaatgtaatagaaatggttttttgagttttttgggaaggatatttatgtttgggaatgtgggtaataaaaattgaggttgttttattttttggagattttaatagtgagggttagggtaggtttgagtttaaagggaaatttagttttgggttagggtttgttttgtattttggttgtggtgagggttttttttttgttttttttgttttagtttgaaatatttttttttttttttttgtttatgtttattttgttttaattttttaaaggttagtatttaaagtaaaataaaatgaaaatataattttttttttggaggggggtaggagggtgggaattgtattttatttaagtgagattttattattagtttttagaagtatttttgatttttttaatttttaaagatttaggataatgagggtgagtgaaagggggagggggagggaaggaatgtatagagtgttaaaaatgttatttgtgaaaataatataagtagtaaggtaattttgggatatggggattgtggtggtaatggtagtttttagttttagattttggagtttgtagttgtgggttattggatggtgggaattgaaatgtttttgggagatttgagtattgtgattgtgtttgtttaatgt

SEQ ID NO: 773 - DNA, 2646 bp, Artificial Sequence
  chemically treated genomic DNA (Homo sapiens)
gggtttttgttaaatgtaagagggatttggttttattgttatttagttggttgtgaaggtgttgtggagtttatttttgtttttggtttgagattgtggtggtgtgtattgagtttgtgtgtggggttttttttgttgatgttgtagatatagagttgagaggtttgggtgttagtagtgggagggttagtgggaaggttgggttttttgttttggttttggaggaggagttattatttttggggtgatgttatttttatagattggaaaatatttgttagttttttgatatatatttagatatatttttatttaatgggtatttatgattttttgtagggagagtttggaaatttttgttgtttttttttttttatttttgtttttgtgtttgtttaaataattgtgtgttatatttgtttgttgattttattggtgtttgttttgtttaaattattttgttttgttatttaggttttgtaaagaatatttatattggatagattttatttttttggttttaaatttttttttgaggggaggtttttaaatgtgtatggatatgttaggtgagttgaagattaagtaaattttagtagtggtttttttttttttttgagatggtaaaaattttttttaaatatttatagtttgttttagttgttttaattttagttgggtttttttgtttatagttattgaaataaatgagtaaatggtttagtttaaaaatataattagatttgagatttgatgaggttggttgtggtggttgtgaatgaaaattggagaagttttgttttaggaaatagggatagttaagggatataaagttaaaaggagagatgggaaagttggggatattttggtatataaagttgttattaaagtttattttttttttatttagataggtgatgttatattttgttagttattaaaggttgtaggtttttgtttagaaaataatattgaggtttttaatatgtgtttattttttaggtgtgtatatatggtttatttttgtaagtaagtatgatgataggaatgttaagtatttaaataaagatagatattttttattttttatttattgttgtttttgttttttgtaattatttaaagtttgagtttttaaaaaaggatttttttttagttttttggagtttgatgttttttttttattattgtagtttgttatggttttttagaatagagtggttttttgggtgtttgtaggttttttaggattttgataattatgttttaattaagattttaaattgtgaattggagatattttttggggggaggaggatgttgtttgagagggagggagaaggagaaatttattttgatattagttttgaaagtttttatgtgtgaattgggtattagttaagggaggaggaaatttattagtttgagggagggaaaataagttttttagagaagatggtggtatttgttagggagggggattgggttttggtttaaagaggattggttgggattgggtatattttgagtggtttttggagttgaggttgggtttttttgagtgtggtggttggttgatgtttttttttgtttttttattttgggttttttttttttgtttttttttagtgtgtagttttggtggtttggttgttattgttgttgttgttgtagtagtagtgttagggataagtttgatttgtgagtgagtgagtatttagtagtaattattattttgggtaatttgtgggttttttgtttgtgggtagtgaatgggagatttttattagtggtttagtgtttttgagttgttgtagtttgaggggtggtgggagtgtttgtattagatttttttagatgtgaaaagggatgagataattgtggaatttattagttgtgttagggtatttttgaggttataattgattgatattttttttttttttggtaaattggatttttttttttaagttatttggtagttgtttttgattttatttttttttttatttttgtttgaaagtttttggtttttttttggaaatttagatagaattgggtatttttgttaattgttgttggggatgtttggttgtgtgtttttgttggttaatgttgtttgtgttttgagtttggtttgtttatttttgaattgtaaagggattaagtttagtttgagttttttgtattgggaaggagagagagtgtgtaagagagtgagtgggagagggggaaaggggaaaggagaggagggaggagagagaggagggaggagagagaaagggagggagggaggggagggattgagagagagtggggagagagaggttgtaattttttttttgaattgtgtatagtgttgtagattttattgttttgatatgtgggttgaatgtaggtgagaaaaggtatggattttgtggttgtgaatttaaatttgggtattgtatggtgtgtattgtttagtttttgtttttgtgggtgaaaggttgttgtggttttaggtggttgttttgtgattaatgattttgtgtagagttgttaagaaaaaagagaaatttgtgttttttggggtgagaagggattgattttgggtgtttttgaagatggtttgggtttttttttggtgtgttggggggattttga

SEQ ID NO: 774 - DNA, 2646 bp, Artificial Sequence
  chemically treated genomic DNA (Homo sapiens)
ttagggtttttttggtgtgttaaagagaagtttgagttatttttagagatgtttagagttagtttttttttattttggagagtgtgggtttttttttttttttaataattttgtgtaaggttattagttatgaagtagttgtttgaaattgtagtagttttttgtttatgggggtgaaggttgagtagtgtgtattgtgtggtgtttaagtttgggtttgtagttgtagagtttgtgtttttttttatttgtatttggtttgtatgttggagtagtgggatttgtagtgttgtgtgtgatttagggaggagattgtagtttttttttttttgtttttttttgatttttttttttttttttttttttttttttttttttttttttttttttttttttttttttttttttttttttttttttttttatttgtttttttgtatgtttttttttttttttaatgtagggaatttaagttgaatttgatttttttgtagtttaaaggtgagtaaattaggtttggagtataggtgatgttagttggtgaaagtgtatggttgggtgtttttaatggtaattaataaagatgtttaattttgtttggatttttgaagaaaagttaaaggtttttgggtgggggtggagggggaggtggagttagagatagttgttaagtagtttaaaaaaaaaaatttagtttgttaaggggagaaaaagtgttagttggttgtggttttggaagtgttttggtatggttggtgaattttgtagttgttttgtttttttttgtgtttgggagagtttggtgtgggtgtttttgttgttttttgggttgtagtggtttggagatattgaattgttagtgggaattttttgtttgttatttgtgagtaggaaatttgtaagttgtttaaagtggtggttgttgttgggtgtttgtttgtttatggattaggtttgtttttgatgttgttgttgtagtggtggtggtagtagtagttgagttgttgaaattatatattaggagagagtgagggaggagggtttgggataaggaggtgggagggagtgttagttagttgttgtgtttgggaaagtttagttttagttttaggggttgtttaaagtgtgtttaattttagttagttttttttaagttaaagtttagtttttttttttagtgagtattgttgttttttttgggggatttgtttttttttttttgggttggtaaattttttttttttttgattaatgtttagtttatgtgtgagagtttttggagttggtgttaggataggttttttttttttttttttttttagatgatgtttttttttttttggaaagtgtttttggtttgtgatttaggattttggttaggatatggttattggggttttggggaatttatgagtgtttagaaagttattttgttttgaaaaattatgatgggttgtagtagtgaagagagaatattaaattttagagagttggagaaagatttttttttgggagtttagattttggatggttgtggggggtaggggtggtggtgggtggagggtgaaggatgtttgtttttgtttaaatgtttgatatttttgttgttgtgtttgtttgtgggggtagattgtgtgtgtgtgtttggggaataaatatatgttggaaattttgatattattttttgagtagaaatttgtagtttttagtaattggtaaagtgtagtgttatttatttggataaaagggaaataaattttaatggtaattttgtgtattaaagtgtttttagtttttttatttttttttttgattttgtgttttttgattgtttttattttttgaagtaaggtttttttaatttttatttatgattattgtagttggttttattagattttaggtttggttgtgtttttgaattgagttatttatttatttattttagtggttgtaaatgaagaggtttggttaggattaagatgattgagatggattgtaggtatttggggagaatttttattattttgaaagagagaaagggttgttgttgggatttgtttagtttttagtttgtttgatgtatttatatatatttaagggtttttttttaaagaaaaatttaaagttgaaaaaataaaatttgtttagtgtgggtattttttatgagatttgggtgatgaggtagaatgatttaaataagataaatattaataaagttaatgagtagatgtagtgtgtggttgtttgggtgggtgtaggaataggaatgaggagggagaggtggtagagatttttaagttttttttataggggattgtagatgtttgttggatggaagtgtgtttaagtgtgtgttagggagttggtgagtattttttagtttgtgaaagtagtattattttaggggtggtggttttttttttgaggttagggtagggaatttggtttttttgttaatttttttgttgttggtatttgaattttttagttttgtatttgtagtattagtgagaaaagttttgtgtgtaggtttagtgtgtattgttgtagttttgagttgggggtgggggtgggttttgtagtgtttttgtggttggttaagtggtagtaaagttaaattttttttatatttggtaagaattt

SEQ ID NO: 775 - DNA, 2372 bp, Artificial Sequence
  chemically treated genomic DNA (Homo sapiens)
gtattgttttttatatttttatttgttatttatatagtgttgagatttaggatttttattttttttttttgtttttatattgtgtgagaagtaagatagtttagatagattgttagtaaagtttagggttttttgtttttttgtttttgtatggtattttaataagtttaaagtataatggataagttagaatttggtgatgtttggagtttgttttgggtttttgtgaaattatagtgttggaatattaggggttttgtaaatttttgttgataatagggaaggttaatggtatgtttgatgttaattgtaggtaggtggtggttttagttatttagggagggtttagtgtagagttttttggtggataggtttagatttagattttttggtaaggaggtaaaatgaggtgggagtagggattattgtgtgttgtttttaggttattttgtatttgttgttggttttttttaggttttgtgtgggatttgaggtttttggttagtgtttttttatgtttttttagattttgttgtttttagtttggtgttttttagagttttgtgttgttagggtgtatttattttttttattgtgttgtgtaatttgtgttgtgtgttttttattagttttttaattttgtggaatattttattgagggtggtttttttttgtgggtagttgagagttgggttgggtttgattggagttgaggttgttgttggagtgggtgtgggggttgtggggattgttgttgttagtagtaggtatagtagggtggttttaagttgttgtatttttgttttgtgtttgtagttgttgtttgtgtgttttggaatgtgattagaggtgtgtggattattttttttgttgggtttgttgttttgttttgttttgttttgttgtttgtttttggtgttttttttttttgtatttgtttggagatgggaggaaattgaggtttttgaaaatgtagtttttttatatttgaaaagatgtgattttatttgttttagtttgagttttgattgttttaggattttgtatttttatttttgagtataagttgagttttgttttttatttgtgatgttggagtttttgttagagtaattgaatttggattttttatgttaatagtttttaagttttagtttatttagattttgtttttggtttaaattttagtttttttttgattaggttagagtgtttgatttttatttttattttaagttttttttagtttttatttggggtggattaagtataggttagttttttttttttggtgttgggttttatttgagtgttttgttttatatttattaagagaggttgagtttagtagagttgtttttttttttgttgttgttttttatttattttgattggattgagttgtgttgtgggttggattggatttgtttgtttttgttgggaggttgttgggttgtgggtgtagatgtgggagtggtgtggtgggtgggttgtgggtgtgggagtgtggtggggtgtggtagtgttggtatttgagggagtttgtaagatgtgttttgtttgtttattaggttttttttttgtttttgttttgagttttgtttgtttattaggtttattttgttttgtggaggggttgtagtttggttattggttagttggggtgttggttattttatgttttatgttttatgttttttttttttgttttagtgattagttttattgaaggtagttattttttttattgtttgtttttgtgtttgtggtattttaggtttgttttttttggtttttaggtttgtaatagtttattgaggttgggggtagggggaatgttttttagttttattttggtttttttaagttaatttttgttttgtgaaatttttaggaaaaattttagtttttagtttggtatttaagttattattgttggttttagtttgttgtgattgatattgtgttttagttaggataatgtatttgtagtttttggaatgggagaatgttatgagaaagttagtaagttttttaagggtggtatagaggagtggttaggattagatatttgtagttagttttgtttttttttaattttttgttttggtgaagttattagatttgtatgtgttttagttagttttaatataaaattttgataagttttaaaaatgtaataaggagtgggtagtggagaattagagaagttagatgattaggttaaatagtaggtgaaggtagggatggttagaggttttgagtgtagttgattgttttttagtttgaaattttaagattgtttttttttgtagtattttttatattattgtttattgttaaaatagttgtttttttttttatttttgggt

SEQ ID NO: 776 - DNA, 2372 bp, Artificial Sequence
  chemically treated genomic DNA (Homo sapiens)
gtttagaagtagaagggaaagtggttgttttggtggtaaatagtaatgtggggagtgttgtagagaaaggtagttttggggttttaagttggagagtagttagttatatttaggatttttggttatttttgtttttatttgttgtttggtttgattgtttaatttttttgattttttattatttattttttattatgtttttgagatttgttaaagttttatattagggttaattgggatgtatataaatttggtaattttgttagggtgggaagttaggaaggagtagagttggttgtaggtgtttggttttgattatttttttatgttatttttgaggagtttgttgatttttttatgatgtttttttattttaggagttgtaagtgtgttattttggttggagtatggtgttaattatggtagattaaggttagtggtgatggtttgaatgttaggttgggggttgggattttttttgaggattttataggatagaggttggtttggaaagattaaggtgggattgaggaatattttttttatttttaattttggtgggttgttgtaagtttggaggttagagaagatgggtttgggatgttgtgggtgtaggggtaggtagtgaaggagatggttgtttttggtagagttggttgttgaggtagaagaggagggtgtggggtgtggggtgtgaggtggttggtgttttggttggttaatggttgggttgtggtttttttgtggggtggggtgggtttggtgggtgggtggggtttggggtgggggtggagagggagtttggtgggtgggtggggtgtgttttgtgggtttttttgggtattggtgttgttgtattttgttgtgtttttgtatttgtggtttgtttattgtgttgtttttgtatttgtatttgtagtttggtggttttttggtgggagtgagtagatttagtttggtttgtagtgtaatttggtttagttggggtgggtgaggggtggtggtgggggaggggatgattttgttgagtttagttttttttggtggatgtggggtggggtgtttgagtaggatttgatgttaaggggagggggttgatttgtgtttggtttattttaggtaggggttgagagaggtttgaggtggaagtgggggttgggtattttgatttggttgaggaggggttagggtttgaattggggatagagtttaggtgagttggggtttgggagttattagtgtagaggatttgggtttggttgttttggtgagggttttagtattataggtgaggagtagagtttagtttgtgtttgaggatgggggtgtggggttttggggtgattggggtttgggttggagtgggtggggttgtgtttttttgggtgtaggggagttgtgtttttaggggttttggtttttttttgtttttgggtgggtgtgggaaagaggggtgttaggggtgggtggtggggtggaatggggtggggtggtgggtttagtgaggggggtggtttgtgtgtttttgattgtgttttgggatatataggtggtggttgtgggtgtagagtggagatgtagtggtttggggttattttgttgtgtttgttgttggtggtggtggtttttatggtttttgtgtttgttttgatggtgattttggttttagttaagtttggtttggtttttagttatttgtaggaggaggttatttttaatgagatgttttgtgaggttgaggaattgatggaggatatgtagtataaattgtgtagtgtggtggaagaggtgggtgtgttttggtggtgtggggttttgagaagtgttagattgggggtagtgaagtttgggaaggtatggaagagtgttggttagggattttgggttttgtgtagggtttgggaagggttgatagtagatgtggagtgatttggaggtagtgtatggtgatttttatttttgttttgttttgtttttttgttaaaaagtttggatttgagtttgtttattgagaggttttgtattggattttttttaggtagttggggttattatttgtttgtagttggtgttaggtatgttgttggttttttttattgttagtagaggtttgtagggtttttggtattttagtattgtggttttatagaaatttgggataagttttaggtattgttaagttttagtttgtttgttatgttttgagtttgttaggatgttatgtagggataaagaggtaaagagttttgagttttgttggtagtttgtttgggttgttttgttttttatgtaatgtgggggtagagagggaagatggaaattttaaattttagtattgtatgagtggtggatgaggatgtgagaggtaatat

SEQ ID NO: 777 - DNA, 2347 bp, Artificial Sequence
  chemically treated genomic DNA (Homo sapiens)
tatatatttaatatttgataatatttatgaaagatgagttaatatattgaatgttagaaatgtatattattaatttttatttttatttttttaatgggttatttttttttattgatatttattttatggttttagttttaattggttaataggatgttaaagtagtttaagatttttttattattgtatagtgatttagttttgaaaggttaaatttatattttgatatttgattttgataattaattatttttgaggtaggtataagaatattaatttaaaagtatatgggtaagtaatttaatattggtatttatgaattatggttatgtaatattatttttaaagtgtttttttttatattgatatatttagtttttaagatgtaaatgttagaaaataaaaatagaatataaatattaatttttaaagataatttaaaaatatagaatatattaaaatttaaaagaagttttgtgttatttttgagtatagtagagattatgtgggatttagtattataaataaaagatgaattatatatttagattaattaaaattaaatatttttggttgattaaaaaaatttttaattttaattatttaatttttaataaatgttataattaaatgattaagaaataagttatttgtttgattattttttttattttaaaatgattttattttaattaatttgtttaataggtttagaatttttttttttattggaatggatgggaaattgaattattttagtaaatgaagaaaaagttgttttttttgaatgagattagtgtagtagattaagttgtgtttaattttgtagagaatatttttgagagtgtgttttttgattttggttagttgatgatttgttaatgaatggtataaaattattttattttttgattgtaaagagattatgttatttatgttgtgggtaggagtggtgtgaagatggaataaattagttttttttagaagtaggttattggtgtttttgggatgtgaattgtgaagtttatataaagtttgagatgggtttttgggggttattttgataaagtgggggtgaaagagggagtggttgtggagtggttggttgtggaaatgtgatatgattatttttagtaagtggttagagtgtggggggtgttttgggtgaggggtaagttgatagttattgagttttttgatgagttttgttaggattattttgttttgttaatttgtagttgttggagaattaaattgttgtgttattgtgtttagttataattaatgtatttttggaaatatgttttgtgggatggtgagttttgtaatgtttgtgtttattaggagtaggagttattatgtgagttttttgtggttttagtgttgttaggagagtttttagtttttttagaattattattgtgtattttttggatagtagtttttgttgtaagaagtggagggaaaaaaaaaagtaataagtagggatagaattagtgttggttgttgtgtatgttgggagttgtagttttggttaggttgtgtgttttgtattgatttttgggtttgttgtggtgtttgttggtttggggttttggtttatagtgtgggaatttgggaatttagtgtgggttgtagaggttttagtaggagttttgttttttggtttgttgatggatttgtttttggttttgttaatttgatttttagtttttagaattttatgatttagaatgtagatttttgttttgtgatagttttttttatttttgattattaaatgatgaattttttttaattgtgaaatgtatttgtaaagttaagtagtgtttttggatatttaagtttagatatgaataagtaagttataaaagtggggtgggtgggtatgagtgagtagaagagagaaattgggttgtaaaaaaggaaaataaaggtgggatgtgggggtatgatttgttgaatggtattaaagttgattttttgtattgtgtatagtgattgagttgagtaaattattttttttttaattataagtagtggtaagaataataataaaattatatttggaaaatgatttgtatttttttggtttgattattttatgttttttgggaaagggatgttaaggtaggtaaagtgggtttttggtatttttaggtaattggttttaggatttttgtagatatttaaatttatttatgtttaagttttttttataaaatggtgtagtatttgtatataatttatatatatttttttatatgttttaaattatttttagattgtttataatatttaatatattgtaaatgttatgtaaatagttgttatattgtatttttat

SEQ ID NO: 778 - DNA, 2347 bp, Artificial Sequence
  chemically treated genomic DNA (Homo sapiens)
ataaaagtatagtgtaataattatttatatagtatttatagtgtattaggtattgtaagtaatttagagatgatttaaagtatataggaggatgtgtgtaggttatatgtaaatattatattattttataaaagagatttaagtatgggtggatttgggtatttgtgggggttttggaattaattatttagggatattgagggtttattttatttgttttgatattttttttttagggaatgtgaaatgattagattgagaaaatgtaaattattttttaaatgtaattttgttgttgtttttattgttgtttataattaaaaaaaaaataatttgtttagtttgattattgtgtatggtgtaaaaaattaattttggtattatttagtaaattatatttttatgttttgtttttattttttttttttgtagtttggttttttttttttgtttatttatatttgtttattttgtttttgtagtttgtttgtttatatttgaatttgggtatttaaagatattgtttgattttgtaggtatattttatagttaaagagggtttgttatttagtagttggggatggggagaattgttataaagtaaaagtttatattttaaattgtgaagttttgggagttgagaattagattggtagggttaagaatgaatttgttgatgagttgggaggtggggtttttgttggggtttttgtagtttgtgttgggtttttgaatttttgtgttgtaagttggaattttaggttagtgggtgttgtggtgggtttggagattggtgtaggatgtatggtttagttagaattataatttttgatgtgtgtggtggttaatgttggttttatttttgtttgttgtttttttttttttttttgttttttgtgatggagattgttgtttaggaagtgtgtagtagtgattttagagaggttggaagtttttttggtgatgttggggttgtgaagggtttatgtaatgatttttatttttggtgagtgtaggtgttgtggaatttattgttttataggatgtgtttttgggggtatattaattgtggttggatgtagtggtgtggtagtttaattttttggtggttgtagattgatgggatgagatggttttggtagggtttattaggaaatttggtaattgttagtttgttttttgtttaaggtattttttgtgttttggttatttgttgagaatggttgtgttatgtttttgtggttggttgttttgtgattgtttttttttttatttttgttttgttaggatagtttttggggatttattttggattttgtgtaaattttgtggtttgtgttttgaaggtattagtggtttgtttttgaaaaaaattggtttattttgtttttatgttgtttttgtttatagtataaataatgtagtttttttgtagttgggaaataaaatagttttgtgttgtttgttgataggttattagttggttgagattagggagtgtgtttttaagagtattttttgtaagattgagtataatttaatttgttatgttgattttatttaggagaggtaattttttttttatttgttggaatggtttaattttttgtttgttttgatgaaggaagaggttttgaatttgttaagtagattggttaaggtagggttattttgaaataaagaaaataattagatgagtgatttgttttttagttatttaattgtagtgtttattgaaagttaaataattggggttaaaagtttttttaattaattagagatgtttaattttaattaatttgggtatatggtttattttttatttgtgatattgaattttatatggtttttgttgtgtttagaagtaatatagaattttttttgagttttggtatgttttgtgtttttgagttatttttggaggttaatatttgtattttgtttttgttttttgatatttatattttaaaaattagatatgttagtatgaaagggagtattttaaaaataatgttatataattgtgatttataaatattaatgttaagttgtttgtttatatgtttttagattggtatttttatgtttattttaagagtagttagttattggggttagatattaaagtgtaagtttaattttttaaaattaaattattgtataatggtagaggaattttaaattattttgatattttgttgattggttggggttgggattataaggtgagtgttagtggaaaaaagtaatttattaaaaaaataagagtagggattgataatgtgtatttttagtgtttagtgtgttggtttattttttataaatgttattaagtgttggatgtatg

SEQ ID NO: 779 - DNA, 2224 bp, Artificial Sequence
  chemically treated genomic DNA (Homo sapiens)
tttgaaaaagagtttaaaagtatattaaatatttagtatattaattattattggttattgaataattaataaaattttattttttaaatagtaagaaggtttagaaggttattagtttttattattagtttttgttaattttttagttagttttaaggatttaaaagataaagtttggagttgtttttattaattttaattgatgttatttggtgttatagagaattataagttttttaggaataaggtttaattggtagtaaggaattattaatgattaatttataaaatttatttaagtatttggtggtagttttaggataatggtagtaagtgatatgtagttaggtgataggatttttgtatttttaaggtttagaagatggtaaaggaagtggagtaagaagggtttggaatgatgttttattgtgtgtttttaggatggtttgttatgttatataatttgaggagttaaattaggaggggaggtaatttggatttaaagggtttatttagggtaagtagaaggaagtagttattaagattttatttatatgttattttattgtttttttttattatttttttttttaatttttttttttaggtttttaaatgattatatttttgtttttagtagtaaaatgtttgtggaagtagaagatggatgttgtggtaattgaatttggagttagatttagaattttagtttttttatttgggaggaggttttgtatggttgtttatgggttttttaagaaggtagtgttttgaggtgggtttttgattttttttttatttttgttgttaggttaaggattgtgttattttaatttatttgatttttggattatggtttgagaagtttggttttgtggattttttagtgttattttttttatagtgattttttaaggttatagttttttaatttttgattttgtagttttgatgtgaaagaataaaagtgttttgattttaaatatattggagatagatttgatgttgggtgggttatgggtatttagtggaaaattagatagataaaaagattttgtttttttgaagtttatattgtggtgaatttaaaagttgttttttaatattagtgttttatttattagtagttttgtttagggtgaggtgttttgatgtttgaagtttattgtttaggtgaaggagaatatagtgtttttaaggattattgtaagttgggtggttaaaatttgaaagaatataaattgtagggtaatgaaggaggtgggggtttttggaggttatttttattagtgttaatatgggtgaaattaggggatttagtaggagtttgaaaattttaagttaaataaatagtgagattatattttttatttgttatttttttttattgttgttgttgtgagatggttgttttgggggtggtttggggaaggtaggggggtttggagaagatggattttgtttttgtttttttttttttttttatttttaatatgggttttgttttggagtgttttgtagaagttgtggatttggttttggagtgtaaattgtgtggttaggtgtttgaagagtttttgtgtatgttgtgtgggtatgttttttgtgttagttgtttgttgttttgggtggtgtggaggtgttggtgtttgttgtagtgttagtttttggtgtttggtgagttgtattgggtgttgttgttgtgtagttttatttagaagttgtgagtttagtgtgattattgtgtttgtggttgtggttatttggttaggttgtatgagttggaggtgtatgttgagtattgtgattttggttttgtttgttggttttgtagttgtgggggttgtgttttggggttgggtggtggtgaggtgtttgtgtgggggggttgtggtttgatatttagggttggttggggtgggggtgtgtgtggggggttgttgggtggttgttggggttgtgggtggggatttgggttttgggtttttgtttggaggtggtgtgagaaggtgttgttggtgtagttttgggtgttgtagggtgaggtgtagtttatggtgtgtaggtattaggagaagtttatttaatatatggtttatgtttgtaattttgttggtgattttggtggtggttattgtagggtaagtaaaggggggtgggtattgtgggtatggttgattggggtgggaaaaggagtggttttttttgatgttttaggattttt

SEQ ID NO: 780 - DNA, 2224 bp, Artificial Sequence
  chemically treated genomic DNA (Homo sapiens)
aggaattttgaagtgttagaaagaattgtttttttttttattttaattgattatgtttgtggtgtttatttttttttgtttattttgtggtggttgttattgaggttgttgatgaagttgtggatgtgagttatgtattgggtgaattttttttggtatttgtgtgttgtgagttgtattttgttttgtagtgtttagagttgtgttagtagtgtttttttgtgttgtttttaggtgaggatttgaggtttgggtttttgtttgtggttttagtggttgtttggtggttttttgtgtgtgtttttgttttggttagttttgggtgttggattgtagtttttttgtgtgggtattttattattgtttagttttgaagtgtagtttttgtggttgtggagttggtgggtagggttgaagttgtagtgtttgatgtgtgtttttagtttgtgtagtttgattgagtggttgtagttgtgggtgtggtagttgtattggatttgtagtttttggatgaggttgtgtagtggtagtatttggtatagtttgttgggtgttaagggttggtattgtagtgggtattggtgtttttgtattgtttagggtaataggtagttggtgtagaagatgtgtttgtatggtgtgtataggggttttttaagtatttggttgtatagtttgtattttagagttgggtttatggtttttgtgaagtgttttagggtaaagtttatgttagggatggggaagaaagggggagtgaaagtagagtttgttttttttgagtttttttgttttttttgggttatttttggggtagttgttttgtggtggtggtagtggagggaggtggtgggtgggaggtgtgattttattgtttgtttggtttgaagtttttaggtttttgttaggttttttgattttgtttgtattgatgttaatagaagtaatttttagagatttttgttttttttgttgttttgtgatttatgtttttttaaattttggttgtttagtttataatggtttttgggaatattgtgtttttttttgtttgaatagtgaattttaagtattgaggtgttttgttttgggtagggttgttgatgggtaaagtgttaatgttgagaaataatttttaaatttattataatgtaagttttgggagagtagaatttttttgtttgtttggttttttgttgaatgtttatggtttgtttggtgttgagtttatttttaatatgtttgaaattgaagtatttttgtttttttatattaaaattataaaattagaagttaggaaattgtgattttaggaaattattataaggaaaataatattaggaaatttatagggttaggttttttaaattgtgatttagaaattaggtgagttagaatggtgtgatttttgatttagtagtaaagatggggaaaaagttaagggtttgttttaggatattgtttttttagggagtttatgaatagttatgtaaggtttttttttgagtgaggaagttgggattttgagtttgattttaggtttagttgttatagtatttattttttatttttatgggtgttttattattggggatgggaatgtgattatttgggaatttggaagggaaaattaaagggaaggatgatgaaagaaagtagtgaaataatatataaataaaattttagtggttgtttttttttatttattttgaatgaattttttggatttaaattgtttttttttttagtttgattttttaaattgtgtagtatgataagttgttttgaaaatatgtagtagggtgttattttaaattttttttattttattttttttattattttttgaattttaggaatgtagagattttgttatttggttgtatattatttattgttattattttgaagttgttattagatgtttgggtgggttttataaattaattattgatgattttttgttgttagttgagttttgtttttggaaagtttgtaattttttatgatattaaatggtattagttggaattgatgagaatagttttagattttgttttttaaatttttggagttaattgaagaattagtaaagattaataatagaggttaataattttttgagtttttttgttgtttgaaagatgagattttgttagttgtttaataattagtgatgattggtgtgttagatgtttgatatgtttttaaatttttttttaaa

SEQ ID NO: 781 - DNA, 2284 bp, Artificial Sequence
  chemically treated genomic DNA (Homo sapiens)
tgtggtattgttttttgtattgtagggttttttgggattgatagattttggataatagtagttgggaaatattttaaatatataatatatttttaatttttaaatattggagttgtggggtttttttttttttttttttttttttttgggggttggaggtggaattttttggaaaattttggtattttgtttttttattaattttattttttgtggttgtttttattaagatatattttttttttgataatttttttatattgtatttagtataatagatgtatttgtggatttattgggtttttattgggttttgggaatattgatgttattttatttaaaaattaatttaagtttaatgttttgatgaaaatgaaaatatatttatagggaagtaaatatttatagttatttagttttttaaatgttatatatattttattttatttaaagtgttttttttttttttttaattataaaataatttagtttatttttaggaagatttttttatttattgtttttagttatgttagtatatttttggttttaaggatagagaatagttaggagttatagtattttgttttttattttttgtatgtttttttttaatttttatttttttttttttttgtgttgtttttttttttttttatgtaaagtagaataagaagattgttttttataaagataataggttttttttaattgtaaatgattatattataagttgtatttgttagttaattagtgtatttaagtttttgttagtggatgttgaaatgatgtttgtaataattgattgggtttttgtgagtttagggatgtagattttttttttttttgttttttgtgtgagttttagttgttaatgaaaattgtatgaaatagattttttttttgttatgtaattggttttttttttgttttttggttgatttgggtataatgttttttatgagagtggagatgtttgtggtgatggtggagttggggaaggggatgtggggatttgagagtatggaatgttttgtttaggtggatgttagttttttgtttgtgagtagtttagtgtattgtttatttggttgtggatggggtggttttatttaattatgatttttttttttgaaatggagtaagattgaataatttattatatgatggatggtgagggaaggaaatgtaaaaaagaaaaggaaaagaaaaaaattggaattagatggttaaattttatattagtattgagaggttgttaggagattttattttgtttgtggttgttttggttttaggtttggttttttggtgtttgtgggtttttatttttttgtttgtttagtttttttagttaggtgtggttgtttttggattggttttttttggttgagtgtggagagtagggttgggtgttggggttaagggaggggtggaggggtgtgtgtttgggtagggatgggggagggagattgggtggaatgaagtggggaaagataagagtggtagaagaaaaaaaaaatttttggttaggagaaaagtggtggattatgtagagagatgttatgaaatttgtagatttaatgaatgttatttaattttagttgattggttgagttttgttggtagtgtatgaagtgatgtggttttgagataaaagtgagtgtagtgttgtgtgttggggaaaaagttgtatagtgttggtgtggtttgggaggaaggggtgggggtgagtaggatagagttatagatttagagatgtttattttgttgtttatgttagttagtgtgttagtgtgttgaggattgggtttggtgggggtgggttgggtataaattaatgtgtattttttgttattggaaatgtgggtgttttatgttgggggaattttttgggttttggtttttgattttttagttttaattttttttttagtgttattaagtaagttatttttggagaaatgtttggaaagtaggaaagagttgaagtttggggagtagttttgtttgttggttgtaggggtttggtttttagggttttgtgagataaggaaaaagaggttttgggtattgttttttattgggttgaaatttgtgagaggtagttttggtgtgggagttggagtttgtattgtttagagggggtgtagtgagtggttgggatggaggggaggggttttatttttgagttttgtttgtatttggtggtgttttagtttgttgttttatttagttttttttgttttgtttattgtaattgggatttggttttggttgttgt

SEQ ID NO: 782 - DNA, 2284 bp, Artificial Sequence
  chemically treated genomic DNA (Homo sapiens)
gtagtagttgggattaggttttagttgtagtggataggatagaagggattgaatggggtagtaggttggggtgttattaggtgtaagtaaagtttagggatagggttttttttttttgttttggttgtttgttgtgttttttttgggtggtgtaggttttggtttttgtgttggggttgttttttatggattttagtttggtgggaggtagtgtttagagtttttttttttttattttataaaattttaaaagttgaatttttataattagtagataaaattgttttttgagttttggtttttttttgttttttaggtgtttttttgggaataatttatttagtggtattgggagaaaggttgggattggggggttggggattgaaatttaaaagatttttttagtatggagtatttatgtttttagtggtgggggatgtatgttggtttgtgtttagtttgtttttattaagtttggtttttgatgtgttgatatgttagttggtatgggtggtggggtgggtgtttttgggtttgtggttttgttttgtttgtttttgttttttttttttggattgtgttggtgttgtgtggttttttttttagtatgtggtgttgtatttgtttttattttggagttgtgttgttttgtgtgttgttagtggggtttagttagttggttggaattgagtagtatttattgaatttgtggattttatgatgtttttttgtgtggtttattattttttttttaattggggatttttttttttttttgttatttttatttttttttattttattttatttagttttttttttttgtttttgtttaaatgtgtgtttttttgttttttttttggttttagtgtttagttttgttttttgtgtttggttagagggagttagtttggagatggttgtatttggttggagaggttgggtgggtggaggggtggagatttgtggatgttgggaagttggatttggagttggagtagttgtgagtagaatggagttttttaatagttttttggtgttgatgtgaaatttgattatttgattttagtttttttttttttttttttttttttgtattttttttttttgttatttgttgtgtagtgaattgtttagttttgttttgttttaagagaggagattatgattgagtgaagttattttgtttgtagttaggtaagtggtgtgttgagttgtttgtaggtgaggagttggtgtttatttgggtgaggtgttttgtgtttttgggtttttgtgtttttttttttagttttgttgttgttgtaggtatttttatttttatgagaaatattgtgtttaagttagttgaaaggtgagggagaagttggttatataatagaaggggaatttgttttatatggtttttattagtgattgaaatttgtatggggggtgggggaaggaggggtttgtatttttgggtttgtagaaatttagttagttattgtagatattattttaatatttgttggtaaagatttaaatgtattgattaattgataggtgtggtttgtgatgtagttatttatagttgggaaaagtttattgtttttgtggaaggtagtttttttgttttgttttgtatggagaggagaggagataatatgaaagggaggaaaagtgagggttggggagaaatatgtggagaatgggaaatagaatattgtaatttttaattgttttttatttttaaaattgaagatgtgttagtatgattaaaaatagtgaataggaagatttttttaggagtaaattgaattattttgtaattggaagggaagaaaaaatattttagataaaatgagatgtgtgtggtatttagaggattgggtggttgtggatatttgtttttttgtggatatatttttatttttattaaaatattaagtttggattagtttttaagtgaaataatattagtatttttaaaatttaataaaagtttagtggatttataggtatatttgttgtattaggtgtaatatggagagattgttagggggaaaatatattttaatagaaatagttatagagggtgaggttagtggagaaataaaatattagaattttttaaagaattttgtttttaatttttaaaaaaaggaagagaaaaaaaaaaaaattttataattttagtgtttgggagttggagatgtattatatgtttagagtgttttttaattgttgttatttaaagtttgttggttttggggagttttatggtatagggagtaatgttata

SEQ ID NO: 783 - DNA, 2498 bp, Artificial Sequence
  chemically treated genomic DNA (Homo sapiens)
taagggttaagtaatgatgtataaatggggtttattgtttaaatttatagaaagtaaaatgtggaaaattagtaattttaattgatagtgtatatttaaagaatttatattggttgggtgtggtggtttatgtttgtaattttagtattttgggaggttgaggtgggaggattatttgaggttaagagattgagattagtttgattaatatggtgaaattttgtttttattgaaaatataaaaaaattagttaggtgtggtggtatatgtttgtagttttagttatttgggagggtgaggtaggagaattgtttgaatttaggagatagaggttgtagtgagttgagattgtgttattgtatttgtttgggagatagagtgagattttgttttaaaataaaaaataaataaaaagaatttatttaatagaattaagtattaatataataaatatgaagaattttagatttttggtttttaaaaaatatataaagatgatatttttttaaaatatttttataaaatatattgagattgtgatgttttatattgattgtatgaaaataatgaaaaagaattagtattgttttattataaaagttttattaatgtaaatttataaatttttttttaaatattttgagttaattttaattttatgatagaaatttattatttttagtaaaaatagttggtatttgggaaattaaaggtttaaaaattaagaatagtaattaaagaaatttgataaaatagtttttttaaaatttttatttatattataaggggaaattttgattatgtttttttttttttattaattgtagaatttaatattaaggattatataattttatatttttttttgagaaaaagtaaaggttttgtgttgtagtaataatgtaagatatggagggaagttttatttaagatttttttgtttgttttttttttaaagttattttagaatattagggagggttgagaggtaaggtatgaagggtgtaatatttaatatgagtaatgtgtgtgatgtatttggttaaaatgtatatagaggatttgtttttgtttttagatagaagttttttgttttgtagttatgagggttaattgttgaggttttatagttttttttttttttatatttggattgttatgttttttatttattattttgatgtagaggtagatttaggatttttgtatttgttaaggattttttggtaagtttatggggtgggagtggttataagatggagtttgtttggttttggtttttttggtttatataagtttgttttttttttaatttttaatttttatagttttttatttttttatttttgatttattttgtgttattgatgtttttggtttttgtttgtagtaagtttatttttattattattttttgtataaaagtttgtatttattaggttaaagaggggaattaatgtttgtaggaattgttttattgaattgtttggttgtgttttttgttagattttatttgttgttgtggattgtatataattatttttggtatgttttgtgtatgtattattttttttattttgttttttttttgtttaaatatgtgatttttttttgtttttgtttatgtttatttttgtttttttatttttttttaggaaggaggagggagttgggggtgttaaaagtgtagtgattttttttttttttttgtttttgtttttgtattttttgttataatgttttttgggttgttagtgttttgatgttttttgggaaaatagtttatttttttttttttttttttttttgtttttaattaattagttatttgttagagagggatatgtgtagtgagtgttttttgttttttttatttgaatttttttttttttttaagtagagagattttagtagtagtagtagttgatgatgaagagagaggtagtggtagagggggggtattttttatttttatttttaaagggataggatattaattttattttattttaattttgaatttaggggggtggggggaaggtggttgagtttttttttttattttttagttttgagttttgagagggggattgagtttgagagaggagaaggagtttttttttttttgaaaatttttatttatgatttttatttttttatttttttaatttgtttttttttttttattttttttttttttggttgtgagaggaggagagaaagaaattaaaagttttttagtaatatagattttttgttgttgttgttgttgttgttgttgttgttgttgttgttgttgttattgttgttgttgttattgttgttgtttggttttggttggagatattttattatatttaggagtagttatttttttagttttttttttttttttttgttttttttttttttattttttttttttattattttttgtgttattttttatagttttagggaaggtatttaaaagtggggggtaggaaaggtaagtgtgt

SEQ ID NO: 784 - DNA, 2498 bp, Artificial Sequence
  chemically treated genomic DNA (Homo sapiens)
atatatttattttttttgttttttatttttgagtgttttttttggagttgtggaggatgatataaagggtaataaagggggggagtggaggaggaggaggtgaaggaggaggaggagagttggggaagtggttgtttttgggtgtagtgagatgtttttagttagggttaagtagtagtagtagtagtagtagtagtagtagtagtagtagtaatagtagtagtagtagtaatagtagtagtaaagggtttgtgttgttaagaggtttttggttttttttttttttttttttatggttaaagaggaggagggtggagggagggaggtgagttggaggggtgagggggtaggagttgtggatgggggtttttgaagaagaagaaattttttttttttttttaggtttaattttttttttagggtttagggttggagggtgggggaaggaatttagttgttttttttttatttttttgaatttaaggttgaagtggggtagaattagtgttttgtttttttaaaaatagaaataaaaggtgttttttttttgttattgtttttttttttattattagttgttgttgttgttggggtttttttgtttgggggggagggggggtttgggtagaagagatgggaggtatttattgtgtatgtttttttttgatgggtggttggttggttgaaggtaggaggagggggaggggaggaaatgagttatttttttagaaggtgttgaggtgttagtgatttggaagatattgtagtgggaggtataggagtgggggtggggaggaggaggaagttgttatgtttttaatatttttagttttttttttttttttaagggaaagtggaggaatggaagtgggtgtggatggagatgaaaggaggttatgtgtttgggtgggagaggggtggggtgggagaggtagtgtgtgtgtggggtatgttgggagtggttgtgtatggtttgtagtggtaggtgaagtttagtagaggatgtggttaggtgatttggtgaagtgatttttgtaggtgttggtttttttttttgatttggtaaatgtaggtttttatgtgagaggtaatggtgggggtaaatttgttgtaaatgaaggttaggggtgttggtggtgtaaggtgaattgaaagtgggaggatggaaggttgtggagattgggaattgggaagggggtaggtttgtataggttgggaaggttaggattaggtgagttttgttttgtggttatttttgttttgtgagtttgttgaggaatttttgataagtgtagggattttgagtttatttttgtattggggtagtaggtgaggagtgtgatggtttgagtgtaagagagaagggaattgtgaagttttagtaattgatttttatgattgtaggatggaggatttttatttagggatagagataagttttttgtatgtattttgattagatgtattatatgtgttgtttatattggatattgtgttttttatgttttattttttaattttttttggtattttggagtggttttggggaaggagtaggtagggaagttttgagtggagtttttttttatgttttgtgttgttgttataatataaagtttttgtttttttttggagagggatgtgggattgtgtagtttttaatgttgagttttatgattgatgaaggagaagggatgtgattaaagtttttttttatagtgtagatgagagttttaaaaggattgttttgttaagtttttttggttattatttttagtttttgagtttttggttttttaaatgttagttgtttttgttgaaaataatgaatttttattataaaattagaattaatttaaaatatttaagaaaggatttataaatttatattagtaaagtttttatagtgaaatagtgttggtttttttttattgtttttatataattaatataaagtattatagttttaatatgttttgtaaagatattttgaaggaatattatttttgtatgttttttaaaaattaagaatttaaaattttttgtatttattatgttggtatttaattttgttgggtgggttttttttgtttgttttttgttttgagatggagttttgttttgttttttagatgagtgtagtggtgtgattttggtttattgtaatttttgttttttgggtttaagtagtttttttgttttatttttttgagtagttgaaattataggtatgtgttattatgtttggttaatttttttgtgtttttagtagggatggggttttattatgttggttaggttggttttgattttttgattttaaatgatttttttgttttggttttttaaagtgttgggattataggtgtgagttattgtgtttggttggtgtaggttttttaggtgtatattattagttaaagttattaattttttatgttttgttttttgtaagtttgggtagtggattttgtttatgtattattgtttagttttta

SEQ ID NO: 785 - DNA, 2357 bp, Artificial Sequence
  chemically treated genomic DNA (Homo sapiens)
ttttatgtttttgttgtggttgatgttttagtttttgtttttgtttttatagggtttgttttgtgtatttgtttttattttgttttgttttttatggaggaatattagtgattgatttgggatttagttttaatttagggtgattttgtttttagatttttaattatatttgtaaagttttattattagggaaggttgtattttgaggttttgggtggatatgaattttgggggtaggatattgtttagtttagtgttgggtgttgttgtgggttaggttttttgatttttgtaagtttatgatggttatagagttttaaggaggaggttttttggaggaggtggtttagtttattagagaattagtatgttttttttttgggttttgggattagtatttttaatgataagtttttttggattatgttgatttgggttgagatttgttgtttgttgtgtgttttgggtggaggttagataggttgtgtatttttaagttttgatatgttttttttttaaagggtggaggttttatagggtgagtgtaggttggggatgggttgtggggttgttgggaggggattagtgggggtttgtagtgtttttgggagggtttggggttgggggtaattgagatttgttttggtgggtgagtggagaagtatttggggggttttttttagtgttggagagaaatgggtgatgaagtttgggaaaggtgtggggggtttgaagtgtgtattatggtgagaaggttgtgtgtggttggattttagtttttttgtgtttgtgaaaggttgagttgtgttggttgggggagggttggaggttgttgggggttgggggatgaagagttgggggtagtttagggtagtgtattttttgtggaggtaggaatggtaggtggtgtgatttttattaggatttttgttattggaattgtgggtttttgttgggttggaggtgtttgagagatttttgtggaatggtgtgtgaatttgtggttgtggtggtgggtttggatggagatggatgttggatgggttgttttttgagtttggtttttgtggtggggttggttttttgtttttgtatttggtagatttgatgtggagtttgagggtggttgttggtttggggtggggaaggggttttttagattgggggttttatttgttgggtttggggagtttatttggttttttttgattggtttggagttgtaggtgaggttattttaggaagttgttgtatttgagggagtttgggttgttttgggggatgttggggtttgatttttggggttgggggttgtatgggtgggttggggtttgtttgggttggggtttgtggttgtgtggggtttggattggtgtttgtttggtttgggggtttttagttgtatgtagtttgggttgaggttgggggtttgtggttgtgtggggtttgggttggggtttgtttggtttgggggtttttagttgtatgtagtttgggttgaggtttgtagttgtgtggggtttggtttttatggtttttgtgtttggattttgttttttaattattttttttgtatgtttttttggaaaaggatatggggtttagggtggtggatgtggatattttttgaaatttattagttttggtttgtgatgtttggatggaggggttatagttatgttggtttttagtttttttttagatattttagtttttggaggtagggtttttttgtgaggtgtattatttttgagtgttttatatgtttgtttttgggtatttttttgggtggtggtgtggtgtggttttgtgtttttatttaaattttatatggaaatggagtttgtagtgtgatggtggggtttggtggggagtgattgggtagtaggggtggattttttgtgaatggtttggttttgttttttttggtgttgtttttgagattgtgagtggttatttaattgtgttttgtatttgttttgttttttttgtttttgtttatgttatgtgagatatttgtttttgttttgttttttattatggttggaagttttttggggtttttttagaagtagaaatatttgtgttttttatatagtttataaagtgtgagttaattaaatttttttttttataaattatttagttttagggttttttttgtttgtttgtttgtttgttttggtggaggtgggggtggatagtgtttttttttgttgtttaggagggagtgtagtggggtgattttagtttaatgtattttttgtttttgggttgaagtgatttttttgttttagttttttgagtagttgggattatagttatgtgttattatgtttggttaatttttatatttt

SEQ ID NO: 786 - DNA, 2357 bp, Artificial Sequence
  chemically treated genomic DNA (Homo sapiens)
aaagtataaaaattagttaggtatggtggtatataattgtaattttagttatttaggaggttgaggtaggagaattattttaatttaggagtagagggtgtattgagttgagattgttttattgtatttttttttgggtgatagagagagatgttgtttatttttgtttttattaaaataaataaataaataaataaaaaaaattttgagattgggtaatttatagagaaaagagtttgattggtttatgttttgtaggttatatggaaagtataggtgtttttgtttttggagaggttttaggaagtttttaattgtggtggaaggtgaagtgggagtaggtgttttatatggtgtgagtgggaatgagaaagatagagtaggtgtgggatatagttaaatggttatttataattttgaggatagtattaggagggatggggttaagttatttatgagaaatttgtttttgttatttagttattttttattaggttttattgttatattgtagattttatttttatgtgaggtttgggtggggatgtagagttgtattatattattatttaggaggatgtttaggagtaggtgtgtggggtgtttagggatgatatgttttatggggggattttgtttttaggggttagggtgtttgggaagaggttgggagttggtgtggttgtggtttttttatttaggtattatagattagggttggtgggttttagggggtgtttatatttattattttgaattttatgtttttttttagggaaatgtgtagaggaaatggttggagagtgaagtttaggtataggggttatgagagttggattttatgtagttgtagattttgatttgaattgtatgtggttgaggatttttaagttaggtagattttgatttagattttatgtggttgtggatttttgattttgatttaaattgtatgtggttgaggatttttaagttaggtagatgttaatttagattttatgtggttgtggattttaatttagatagattttgatttatttgtgtagtttttagttttagaagttaaattttagtgttttttagggtggtttgggtttttttagatatagtagttttttgaggtggttttatttgtaattttagattaattagagaaggttaaatgggttttttaagtttagtaggtgggatttttgatttagagagttttttttttgttttaggttaatagttatttttgggttttgtattaggtttgttaaatgtaggggtgaggggttgattttgttatgggaattaaatttaggaaatagtttatttagtgtttatttttatttggatttgttgttgtggttgtaggtttatgtgttgttttgtggagattttttaggtgtttttggtttggtagaaatttgtggttttgatggtagaggttttggtgggaattgtattgtttgttgtttttgtttttgtggaggatgtgttgttttaaattgtttttggttttttattttttaatttttggtagtttttgatttttttttggttggtgtagtttagttttttgtagatgtgggggagttggaatttgattatgtgtagtttttttattgtggtgtatgttttgggttttttatgttttttttaggttttattatttatttttttttagtgttgaaggaaattttttagatgtttttttatttatttattgaagtaggttttggttgtttttagttttgggtttttttgagaatattgtaagtttttattggtttttttttggtaattttatggtttatttttaatttgtatttattttgtggggtttttattttttggaggaaggatgtgttaaagtttggaggtgtgtggtttgtttaatttttgtttaaggtgtgtggtaggtgataggttttagtttggattagtgtggtttaaaaggatttattgttaaaagtgttggttttagaatttaaggggaagatatgttggttttttgatgagttgggttgttttttttaggaagttttttttttggagttttgtagttattgtgggtttgtaagagttaaagggtttggtttatagtggtgtttggtattgagttggatagtgttttgtttttaaaatttatgtttgtttagaattttagaatgtaattttttttggtagtagggttttgtagatgtaattaaggatttggggatgaggttattttggattgaggttgagttttaagttagttattggtgtttttttatgaagagtagagtagaatagagatagatgtatagagtaggttttgtgaggatagaggtagggattggagtgttggttgtagtaggggtgtggag

SEQ ID NO: 787 - DNA, 2193 bp, Artificial Sequence
  chemically treated genomic DNA (Homo sapiens)
ttgtagtataaaggaatataaaagggtagagtaaagtttttttttttaaggtgaatatttttaaggtaagtatttatttgtaaaagttttttttttttattatgtttgaaaatttattattatgtggttagtattataagagatattttttggttaaaaaaaaaaatattattttgtaatttagtatatatttgtagttggtgtgtttatttaaattaattagtaggttaagagaatttaaaattttatatatatgagtttaggtattaatgttgattatatagtatatagtatagagggaggtttttatatttatatatatatatattttatttagtatttatattaaaagttttattttttaaatatttttaattattttgtaaatagtaaatgtattattggttattatttttaatagtttgtttttttttttttttattttttttatttttattggtttttttgtgtgataatgatttatatatggatagggtttaaattatttggaagatgtttgattttaggttgaaaagtagtttttaataaaattggttttttgtagttattataaagtattaggaaaagggtatttttgtggttatttttagttaggttagtatagtgttttgtgtttgttgaattgttttaggtagttttttgatgatttaaattattattatttttgggtttagagtaggataaatgaaattttaataggggtttgttttgtgattgaaaattatttagttttatagtttttgaatgtaaggagaggtggtttttttagaattaatatgttttttaaggtgggtatgtttatggttttgggaaatgtatattttaggtaatttataggtgtgattttttagtggaggtggggtagtttgaatttttggttttgtaggagtgggaagaaattgtttttgtttttttgataattgagttttttatttggggttgggagggtggatagtaggattggtttttttattttttattgtggttttttgatttggttagtagttttggtgtttagataaaaggttttttgagttgggggtggggggtaggttgagagtaggttggtaaattagattttgtagttttttaagttattagttttgtatttgggtgtagagattttgttttaaaaatttgaagtattgttttggtttgttttttgtttgtgggtgtgggtttttgtttatttatttatttatttatttaattatttatttatttatttatttttttttgatgtatttgtttgttttttggttgttttgggtgtattattgtttttttttttgtttgagggattttttgtgttttaggattattttatagagtttgtttatgtttttggtgaggtttttgttgatgatggtgtatgttggttggatgtgataggtggtggttgggataagtttgtgtagtgttagttgttttttaatttttgttattggtagtgatttgggtaggttttgtttgttggtgatgattagtagtggtgtgttttggtttttggtgaatttggttattttgtgtagttttgttttggttttttttagttggtttatgtttattgagtttattatgtagatgatgttgtttgtgtagtggttgtaggatttttatagtggttgtagttttttttggttgtttatgttttagaagtggtagttgatgtttttggttgtgttgttgtttagtttgatttttttggtgttgaagttgatggtgggtattgtgtttatgaatttgttgaatttgagttggtagagtattgtggttttgttggttgagtttaagtttaatatgatgatatgtagggattggaaggttgagatgttagaggagatgttgtttatggtttttggttgtggtgttagttattgtggttgtggtgggagggtgttgttttttgagtagttatgggtttgatgtggttgggtgtatttgggttttgtttgttgttgtttgtattggttttggggtttggtgtttttgtgggtgtatggtttggtgtgtttagatgttgtagtttttgtgtttttgttggttgggtttgtgattggtgggtattgtgtttttatgtgtggttttgttttttgtgaagttgttttagatgtttggtgttttttttaggtttgggtttgttttgtggtttttttgggttgtgtttttgtg

SEQ ID NO: 788 - DNA, 2193 bp, Artificial Sequence
  chemically treated genomic DNA (Homo sapiens)
tgtgggggtgtggtttgaggaaattatagagtgagtttaggtttggggagggtgttgaatatttgaggtggttttgtgggagataaagttgtgtgtagagatgtgatgtttgttgattgtgagtttggttggtgagggtgtggggattgtggtgtttgagtgtgttaagttgtgtgtttgtggggatgttgagttttggggttggtgtgggtggtggtgggtggggtttaggtgtgtttggttgtgttgggtttgtgattgtttggggggtggtgtttttttgttgtagttgtagtggttggtgttgtagttaggagttatgggtaatattttttttaatattttggttttttagtttttgtatattgttatgttgggtttggatttggttggtaagattatggtgttttattggtttaagtttaatgagtttgtgaatatggtgtttattattggttttaatattgagaagattaagttgagtaatggtatggttaagggtattagttgttatttttgggatgtgggtggttaggagaagttgtggttgttgtggaagttttatagttgttgtatggatggtattatttatgtggtggatttggtggatgtggattggttggaggaggttaagatggagttgtataaggtgattaagtttgttgagaattagggtatgttgttgttggttattgttaataagtaggatttgtttaagttgttgttggtggtagagattgagaagtagttggtgttgtatgagtttattttggttattatttattatgtttagttggtgtgtgttattattggtgagggttttattgagggtatggataagttttatgagatgattttgaaatgtaggaagttttttaagtagaagaagaagtggtaatgtgtttggagtgattggggagtgagtgagtgtgttaagaaagaatgaatggatggatggatggttggatggatggatggatggatgagtgagaatttgtgtttgtgaataaagagtgaattaaagtgatgttttgaatttttaaaatggaatttttgtatttaaatgtaggattggtgatttaaggagttgtgaagtttgatttattggtttatttttgatttgttttttatttttagtttaggggattttttgtttgaatgttagagttattgattaggttggggggttgtggtggggagtggaagagttggttttgttgtttgtttttttagttttaggtggaaggtttagttgttggaaagataaaagtgatttttttttatttttgtagggttagaagtttaggttgttttgtttttattgggggattgtatttgtgaattatttgaggtatgtattttttagaattgtgggtgtatttattttggggggtatgttggttttggggggattatttttttttgtatttaggggttgtgaagttgagtaatttttggttatagggtaggtttttgttgaaattttatttgttttgttttgggtttaaaggtggtggtggtttgggttattagaggattgtttgggatggtttagtgggtatggagtgttgtgttggtttggttggggatggttgtggaggtgttttttttttggtgttttgtggtggttgtagaagattagttttgttgagaattgttttttagtttggaattagatattttttagatggtttggattttgtttatgtgtaggttattattatataaagagattaataaaaataaaaaaaataaaaaaaaaaaaagatgaattattggaggtggtggttaatgatgtatttattgtttgtaggatagttaaaggtgtttaaagggtaaggtttttggtgtaaatgttggatggggtgtgtgtgtgtgtggatatagggatttttttttgtattgtgtattgtgtaattggtattaatatttagatttatatgtatggaattttaaatttttttagtttattgattggtttggatgagtatattagttgtaggtgtgtgttgaattgtaagatggtatttttttttttaattaagggatgttttttgtaatattaattgtgtgataatgggtttttagatatgatgaaaaaaaaaaatttttataaatgaatatttattttagaaatatttattttaggaaaaaagattttgttttgtttttttatatttttttatgttgtaa

SEQ ID NO: 789 - DNA, 2410 bp, Artificial Sequence
  chemically treated genomic DNA (Homo sapiens)
attttttaaagattatgtaaaaaaaaaaaaaaattaataaatgtttatttttggatgtttaattttggttttgatagaatgttttttgtattaaaaaataagaatttagttaataatgtttttgttgttaaatggttgtatgaagattatgtttagttaaatttaattttttattttgttttaaggttatgatttttaatttttattaaagtttttattattttttattttgtaaaggttttaaagaagttaatgaagaaggtaaagtttttgttttttgttgttatttagtaatgagtagttttatgtggtagtgtagaaattggggtttgagaaatagaggtgttttgatattttggattggtaattatgaaaattttagtattgttataaagatgttgttttaatttggttttaaataaagttttgttggtggttggtagtgttttagtgggtagtaatgtggtgatatttttataggatattttataggttttaaaatatttttttttttttaggttattaattttttaaattatatagtggggtatggttggagtattttttttttgaggtaagggaattgaagtttaagaaggttttttgatttgttaagatttttttgttattttggttttaagaaattgggtttaagaaatttaagtttatggattttttgttttttgtgtgtttttattatatttttaatttaaagatttttttaaattttatagaaataatttagtaagggtagtttttgagtatatttttttttttgagttttaatttttatttaaggtgaaataattttttttttgaaagttttttatgttttttaagtggatagtattaagtttgtaggggatttgtattagttttagtaggtggattttataaggggtgggttgggggaatgtttgtttgattgtgtttggtgtggtggggggttgggggtgagaagagtgggggttgttatgtagggtgtttggattaaataatatgttgtgattttatattttagtttagtttagttatgtagttaaatgtttttttgttattatatatttatgattttggttgtgttgaggatgaaaatagagaaaagatattgattttagaatattgtgtttgggaggatgtagggtgtaggttttgtagtttttgagaattgttttgtgtaaaagtgttttgaggttttgtttttgtgttttttttggtttaagttgaatatagggttaattttattttataaagttaattggatagaaatttgttattttgtgaggagtttttttttattgtttttaaggggtttttgatattgttttgagtgattttaagatatttgggtgtttttgttgggtataaatttttttggtgttatttttattatttaattttttttgtggtttttttttttttttttttaattattttttttattttgtgttgtttttattttgtttttggttttgttagttttatttagttaaatttgagtggtggaatgttgtgttgggtaaatgttgtgtgttgggtttttttttgtgtggttttgggtagtgttttgtggttattgtgtttttggtaatagtagaaaggggagggaggagagttattgaggaggggatagtgatgttttgatgttgttatgttttttgttttttatatgggggttattgtagttttttagaagttttttagggaagtaaagtgttgtttttgttgtaggtattgagatgttgtttagatggaagaaattttggagatgtgtgtttttatattggtgttgtggtgtttgggtttagtattatgtatttatgtgtgtttttgttggtttttttagaaattttgttttgtttatttgtggtgtgagatgtaatgatgtttttaggggttaaagatttggtagaaatgattttttaattttagatgtttttagtagtagtatttagtagttatataattgtttgaaatgaagaatgagtaatttggatgagttggttttgaaattgatttgtaatttatttggaatgtgagttgtttttttttgatttttgttggttgttttatttggagtttgagtttgatttatgtagtattttattgtttgtgttagtttagtttttattgttagtaatttgttattttgtttttttgtagtgaaggtttggaattttattatgggtgtgtagtggttagttttgagattatggtggtgttaggagaatttgttaattaatatagaaagttgttatgaatagaaatttaagttttggttgggtgtggtggtttaagtttgtgattttagtatttattttgggaggttaagttggatggattatttgaggttaggagtttgagattagtttggttaatatggtgaaagtttgtttttattaaaaatata

SEQ ID NO: 790 - DNA, 2410 bp, Artificial Sequence
  chemically treated genomic DNA (Homo sapiens)
tatatttttagtagagataggtttttattatgttggttaggttggttttgaatttttaattttaagtgatttatttgatttggttttttaaagtaggtgttgggattataggtttgaattattgtatttggttagagtttaggtttttatttgtgataattttttgtattggttggtaggtttttttagtattattatgattttaggattaattattgtatatttgtgatgggattttaaatttttgttgtaagaggataaggtgatgagttgttgatagtgaaggttaaattaatgtggatagtgaagtgttatatgagttggatttagattttaggtgaagtagttagtagaggttagagagagatagtttatgttttgggtaagttgtaggttgattttagggttgatttatttagattatttattttttattttaggtaattgtatgattgttaaatattgttgttgggggtatttggggttgggaagttatttttgttaggtttttgatttttgaaagtgttgttgtgttttgtgttgtgggtaggtagggtgggatttttaggaggattggtagaggtgtgtataggtgtgtggtgttgggtttgggtgttgtggtattggtgtaggagtgtgtatttttagagttttttttatttgggtgatgttttggtgtttgtggtgggaatggtgttttgtttttttgaggagtttttagagagttatggtggtttttgtgtgggaggtggggggtgtggtggtgttggggtgttgttgttttttttttggtagttttttttttttttttttttgttgttattgggagtgtggtggttatggaatgttgtttggagttgtgtgagggaggatttgatgtgtggtgtttatttagtgtagtgttttattgtttgggtttggttgggtgaggttggtggggttgggggtgagatgggagtggtgtggggtggagagggtggttggagaaagggaagggagggttgtgggagaggttggatggtggaagtggtgttagagaggtttgtgtttagtagagatatttaggtattttagggttgtttagagtagtgttggggattttttggagatagtaggaaggggttttttgtggggtggtggatttttatttggttgattttgtagagtgaggttgattttgtgtttggtttgggttgggaagggtgtagaagtgggattttaggatatttttatgtagggtgatttttagagattataaagtttgtgttttgtgtttttttaggtgtagtgttttgggattagtgttttttttttgtttttgtttttaatatagttaaagttgtggatatgtggtgatagaaaaatatttggttatataattgagttaggttggagtgtgaaattgtggtgtgttatttggtttgggtgttttatatagtaatttttattttttttgtttttaattttttgttatgttggatatggttaggtgggtgtttttttaatttgttttttgtgaagtttatttgttgagattgatatagattttttgtgaatttgatgttgtttgtttggaaaatgtggagaatttttagaggaggggttattttgttttgagtgaaaattaagatttaaaggaaaaggtatatttaagagttgtttttattgggttatttttgtggaatttggaaggatttttgaattgaagatgtggtgggagtgtgtagagaatagagaatttgtaagtttgagttttttagatttagttttttaaagttaaagtagtggggagattttggtaagttaagaaatttttttgaattttagtttttttgttttagggggagaatattttagttatattttattgtgtggtttagaaggttaatggtttggagggagggaagtgttttgaagtttataaagtattttgtgaaggtattattatattgttgtttattgaaatattgttggttgttgatagaattttgtttggagttgagttaagatagtatttttatggtagtgttggggtttttgtgattattggtttagagtgttaggatatttttgttttttaaattttagtttttgtattgttatatgaaattgtttattattgagtgatagtagaggataggaattttgttttttttattaatttttttagggtttttataaagtgggagatggtaggaattttgatgaaaattgagggttatagttttggagtggggtgaggggttagatttgattggatatagtttttatgtaattgtttaataataaaaatattgttggttgagtttttgttttttgatataaggaatattttgttggagttaaggttaaatatttaagagtaaatgtttgttggtttttttttttttttgtatgatttttagaggat

SEQ ID NO: 791 - DNA, 2668 bp, Artificial Sequence
  chemically treated genomic DNA (Homo sapiens)
agtatggtaaaagagaaatagttaaggagttggggatgtttagtttggaggagaaataattgaataagttgtgattatgtgaaggttatgtttgtaaataagataagtattttatttattttttaaggtgttggggagtataagaataaaataaagtaggagataatattttttaatataagaattttttaatagaattgtttagtggtggagtggattgttttgtaaaataagaatatttaagtattaattggataatttggttaagatatttattttgttaaatgattagtttattgtaaggttgttggatatatttatttagttttaaatgggaggaggggtggggtggtagataattgttaaggttttttttttagtttgagattatgaatttatttgaatttttaagattaattgttataatgtataatgtttttttatagtaatttatattaataataggttattttttttttttatttaggtaaatttaatttaggagttttttatttttttattaggttttttatagagtaaattttttttttagtagagtagtagggttttgggttttatggtttgtagtaatatttgattttataatttttagttgttttttttagaaagatgtatttttttagggttaggttagaaatgagtattttttttatttttgtggtagtattatttaggattggtaatttattttgtgatttaggatatgtttaagaattagaagaaagtaatttattaagttttgggttttgaattttagtgttaggggtgatgtggaatttttattttttattgaaggggagaaaatgatgagattgttatagaggaattttttatattttatgagagataggttggggttattagtggttttgaatgtgagtttaaagttttggtttggataagaaaaaataggtagttgaggaagatgggatgtgaagggaaatttttgttgtagatattgtggatttgtatgttaagtggtaggttagatttgggtggtttgttttaggaaagggagagggaaggagagtggttaatgtttttgatgttgtattaattttaggtttttatatgttatttttttggattttgtttttattttttaggttttggaagaaaagtgaatgagttttttgtatgttgaggttgtttagtagtattaaggtgtggggtttgttggtgtaaattgtgttaagtaagggtagtagtaattaaaagagggtttaagtttgggttgtggtgttgggttttatttttttttttttgttgaaggatttagtatgtgtatattggaagtattttatttatggtagtttaattgtggtttgtgtttgtggagtattatttggaagtgattgggatatgttgtggttgggtgtttagagttgtagttttggtgataaggtgtggagagtgttgttggaagtgttttggtgggaggtggattttttgaattttattggtgggagtgaattaaggttttgtttttttaaagaaaaggtttaattttagagagatagttttgtagttgtggttaattaatgaggttgagtgttttttgttttgtttaggttggttttttgttttttagtttggagtttatttttttttggagtttgtggggttttttttgggtttgattgttgtgttttggatagggtgtttggttatttttttgttggtggggtttttattgggtttgggaaggtttgggattaggaattaggttttatttttattatttttagggaggaggagttggaagaataagattagggttagggtatttggagttttttttttgttgtttatggttttaggggttatggtatggatgggtttgtgttgtttagtttggtggtttatgttggagattgtggatgggtagtagattggtttagtgatggttttatttttaagttgtattttttattagttgttatttgggtattgtatttttttttaggatagtttttttggttgtaaataggattaaggatgaggtttagttttgttgtttatttgtgtgttttaggaatagttatttaattattttatttttgggtttttgggaggaatatggtaggttttgaagtatttagtgttgggttagagtgaatatttatttaataatgtggtttttattttttttaggttaatatagaggttatttggtttattttagatttgtttttgtttattaggggtttaagtaaaaattattataagtagtaagatttttattgttttttgggttttaattataattttgaggttaatggtgatggtaattgtagagatagaaggtagtagttttttttggatatttgtttattaatttaagaatggagtaaaaattaaaatttttttttatatatttttttaatggattttattttttttttatttttattggttttgttttaagttaagtttttgtagagtttttggtttttgtattttaatttttgtttttttatttttgatatatagtattatatttgtttgtttttaatttagagttaatagtgttaaattgttaagagttggttatggtatagggatattttaaggttttttgtttttaggtttttatttatatttattttagtagttttgtttttttttagtttttgtttagggtttt

SEQ ID NO: 792 - DNA, 2668 bp, Artificial Sequence
  chemically treated genomic DNA (Homo sapiens)
gaagttttgagtaaggattgagaggggatgaggttgttgagatgagtgtaggtggagatttgagagtaaagagttttggggtgtttttgtgttgtggttgatttttaatagtttaatattgttggttttgaattagaggtgggtggatgtggtattgtgtgttgagggtggaagggtaggagttagggtgtaggagttaggagttttgtagaggtttaatttggggtagagttagtgggaatggagaggaagtagagtttgttaagaagatgtatggagggaggttttgatttttgttttatttttgggttggtggataagtgtttgaaaggaattgttattttttgtttttatagttgttgttattattggttttaggattgtggttgggatttagaggatggtggaagttttgttgtttgtggtagtttttatttaaatttttggtggataaaggtaggtttgagatgaattgggtggtttttgtattaatttagaagaggtgggagttatattattgaatggatgtttattttagtttggtgttaagtgttttaaaatttgttatgttttttttaagagtttagagatgaggtaattaaatggttgtttttaaggtatatagataaatagtggagttggattttgtttttagttttatttatagttagggaaattgttttggagagaagtgtaatgtttgggtaatggttagtgagagatgtaatttggaaatggaattattgttaggttagtttattgtttatttatagtttttagtgtgggttattgagttgggtagtataggtttgtttatgttatggtttttggagttgtgagtggtaggaaggaggttttaagtgttttgattttgattttatttttttaattttttttttttagaaatggtggaggtggggtttagtttttggttttgagtttttttaggtttagtgaagattttgttagtaagaaggtggttaaatattttgtttaggatgtgatggttaagtttggggaggattttgtaagttttagagggaagtgggttttagattagggggtgggaggttggtttgggtggagtaaagggtgtttggttttgttgattggttgtggttgtagagttgtttttttaggattgagttttttttttagggggatggggttttgatttatttttattaatagggtttaaggaatttattttttattagggtatttttggtggtgttttttgtgttttattgttaaagttgtggttttggatgtttagttgtggtgtattttgattatttttgggtagtgttttatgggtatgagttgtgattgggttattgtagatggggtatttttggtgtgtatgtgttgggttttttggtaggaggaggaagatggagtttagtattgtggtttgggtttgggtttttttttggttgttgttgtttttgtttggtgtggtttgtgttagtggattttgtattttagtgttgttggataattttaatgtgtgggagatttatttgttttttttttggagtttgaagggtgagagtggggtttgagggggtagtgtgtgggggtttggggttggtatagtattgagggtattgattatttttttttttttttttttttttggagtaggttgtttgggtttggtttgttgtttggtgtgtgggtttgtgatgtttgtagtaggggtttttttttgtgttttgttttttttaattatttgtttttttttgtttagattggggttttgagtttatatttaagattgttgatgattttagtttgttttttataaagtatggggaatttttttatgataattttattatttttttttttttggtagaaggtaagggttttgtgttgtttttagtattggaatttgagatttgggatttgatggattgtttttttttggtttttgggtatgttttgggttataggatgggttgttagttttggatggtgttattatggagataaggaaaatgtttatttttgatttgattttaggagggtatatttttttaaaagaaatagttaaggattgtggagttaagtgttgttgtagattgtggaatttagggttttgttgttttgttgagaagggagtttattttgtaaagggtttgataaaaagatggaaagtttttgggttgggtttgtttgggtggaaagaggaaatggtttgttattaatatggattgttataaagaggtattgtgtattgtggtagttgattttaagaatttagatagatttatagttttgggttgaaaaaagagttttagtaattatttattattttatttttttttttatttgaggttggataaatatgtttagtagttttgtagtgggttagttgtttaatagaatgaatattttggttagattatttagttgatatttgagtatttttgttttatgaggtaatttattttattattgaataattttgttaagaagtttttatattaagaaatattgttttttgttttattttgtttttatgttttttagtattttagagaatagatagaatgtttattttgtttgtaggtatagtttttatataattatagtttatttggttgttttttttttagattgaatatttttagttttttagttattttttttttgttatatt

SEQ ID NO: 793 - DNA, 2182 bp, Artificial Sequence
  chemically treated genomic DNA (Homo sapiens)
taatatgattagtataagtagtttttgtttttttgttttgatttgagtatttgagggttttttgaggtagtttgtatgggtattttggggtttgtgtattgagtgaatttttagatttggttgtgttttagttgtttttgttttgaattttttatttttttttggttgtttggatggtttttttggggtgtttgtgtttttgtggggtatttttaagatatttagtatgaaattttagtattgattgtaaattttattgaaagtagagttatttgtttttgtttttggtaaataatttaattttaagttttgagtttttgtaaatttatgttggttgggttaattttgtttttttttttttttttttgatttttgtaatagtttagagagtttggttttgatgtagtttaaaataatgtgtgttagttttgttgtttggttgattatagtaatgagagttataagtttttgatgttgttttgataatatgaagtaattatttataaaaatagtaatttatgtagtttggttatatatggagttggtgagggtggatggggatgtttttatggattttttttggagaaaataaattgttgttgaaattttttttattttttttattattattttttattttttttttgtttttttttttttttagatgatttaattatagattttattgaaagggggtgggggtgggggtgggggggaatatatatatatatatataaattatatatatattatatatgtattataaaatatatatatatatatatatatatatatatatatatatatatatatgtatatatatatgtatatatattaaagaatattaggaatgtagttgtgggatgaatgtgtttgtttaagattgagtgttaaaatggagttataagagttgttttgtgtgggtgtttatagaaggtgaaaatatgtaggtttgtaggttagtgtattgggaattgagttaagtgtgttgtagtttgggttttgtttttgtttttgttgtgttttgtttttatttttttttgttttttgttgggtggttattaaaagttgttgatgttaaaatggatggttatttttgatgagggtagagtttatgttgtattgaagatgaaattttggggaggttaggtgttgtttttttttttttttttgtttggtggttttattatagttgtaatttgtagaggtttggagaatataatttttttgagaagtttaggtaagaatttttttttttaggttgtggttttggtttgggatggttgtatatttagaagggatagtagttgggtagtttgagtgggtttgggtaaatataagtattggtgtatttagggtgtggtattttgtgtgtgtatgtttggtgggggttttataaagtgtttttgaggtgagttgttggggaaaagggaaatgggagttttgtaaatggagtgatggggaggaagagtgagggtatgtattgaataataatttatttttttgaaatagtagtgggatttttttttttttttattttgtgatgtagtttttagagatatttaggttgttgagttttttttttttgttgttttaattttattattatgattgttgttgttagggtgttattatttagggaagaattaagggggagatagggtgtgggtgttggggaggtgaaaggagaaagggggagtttttgttttgggtaagttgagttgttgtagtgatagtagtttttatgttttgtggatttgatttatgttgtttgttttatgttaattgtaggttggtgggaggtgggtgggttgtgttgggtgggagggttttgtggagggttggtgtgggtgggttggttttggggattgtggtggtttgtgtttagtattttggatagtaatattgagggtttgtgtgggtgtttttgattttttagtattggggatagtggtttggttgtagtgttttatttgtttgtggtagaaatgtttggttggggttggatgtgttagggttggagattaaattgtttttttgagattttggttttatggagatttttaatagaggagttatagtagtttaaaagaaaataagaaagaaataaattttttttatagagatttttttgtagataattttttgtttttttttttattttttgtatagttttaataaa

SEQ ID NO: 794 - DNA, 2182 bp, Artificial Sequence
  chemically treated genomic DNA (Homo sapiens)
tttgttgaagttatgtaggaggtgaggaggggaataggaaattgtttgtaaaggagtttttgtgaggaagatttattttttttttgtttttttttaagttattatgatttttttattaagggtttttgtaagattggggttttagggagataatttggtttttagttttggtatatttagttttggttaggtatttttgttgtaggtagatgaggtgttgtggttggattgttgtttttggtgttgaaaggttgagggtgtttgtgtgagtttttggtgttgttatttagggtgttgagtgtgggttgttgtagtttttgaagttagtttatttgtgttagttttttgtagagtttttttatttggtatgatttgtttgttttttgttagtttgtagttgatgtggagtaggtggtataaattaagtttgtggggtatggaggttgttgttgttgtagtagtttagtttgtttggggtgggaattttttttttttttttttgtttttttagtatttatattttgttttttttttaatttttttttggataatagtattttaatgataatagttataataatagggttagaatgataggggaggaaaatttaatagtttaaatatttttgaaaattgtattgtaaaatggaagaaagagggggttttattattgttttaaaagagtaagttattatttggtatgtatttttgttttttttttttgttgttttatttgtagggtttttgttttttttttttttagtagtttattttgaaaatattttataaagtttttattagatgtgtatatatggaatattgtattttaagtgtattaatatttgtatttatttaagtttatttggattgtttagttgttgttttttttgggtatgtagttattttgagttagagttatgatttggggaggggggtttttatttgggttttttgggagggttgtgttttttgggtttttgtaggttgtaattgtggtggagttgttgagtagggagggaaggaaagatagtgtttgatttttttgaggttttgtttttaatgtaatgtgagttttgtttttattaaagatggttgtttgttttgatgttagtagtttttaatagttgtttagtgaggggtgggaggaagtgggggtggggtatggtgggggtgggggtggggtttgggttgtggtgtgtttgatttggtttttagtgtgttggtttgtaaatttgtgtgtttttattttttataaatatttgtatggggtgatttttatgattttattttaatatttggttttgggtaaatgtgtttattttgtaattgtatttttgatgttttttggtgtgtgtgtgtgtgtgtgtatatatgtgtatatgtgtgtgtatgtatatatgtatgtgtgtgtatattttataatatatgtataatatatgtataatttgtgtgtatgtgtatatatttttttttatttttatttttatttttttttagtggaatttgtggttgagttatttaaggagaggggaaggtagaggaggggtaaaaggtagtgatgggaggggtgggggaaattttagtggtgatttgttttttttgaagagggtttgtaggggtatttttgtttatttttgttagttttatatatggttaggttatgtgggttgttatttttatgagtgattgttttatgttattgaagtagtgttgagggtttgtggtttttgttgttgtggttagttgggtagtgaggttggtgtatgttattttgaattatgttagagttaggttttttgagttgttgtaggagttgggggaaggagaagggaagtggagttagtttagttagtgtgggtttgtaaggatttgaggtttgaagttgagttgtttgttgagggtaaaaatggatgattttgtttttggtggaatttgtagttggtgttggggttttatgttgggtgttttaggggtattttatggaggtatagatgttttgagggaattgtttaaatggttgggaggaggtgggggatttagagtaaggatggttgggatatggttgaatttgggggtttatttagtgtgtaaattttggggtatttgtgtaggttgttttggggggtttttggatgtttaaattagggtggggagataaaggttatttgtgttggttgtatta

SEQ ID NO: 795 - DNA, 2712 bp, Artificial Sequence
  chemically treated genomic DNA (Homo sapiens)
taatgaaagtgtttaatataaaatgaaattaaatattttttgtataggttttatataagtaaatttgaaaaaaagtgtgtgtgggggggtttatattattaattattatggtgaggaagataaagaagatatggatagaaggtggatggttttgtggtttggtttttgtagattgattgttttttttttttatttgagatggtttgtattgaatttttttgttttttttttgggttttttgggggttggattaatatatttgttgatgttttggttgaatggtaggtgatattgggttttggatttttatatgtagtttagtatttatgaggttttaggttgttggaagtttgtagttttgtggatgatgaaagtttgtttgtaggtttttttggagtggtgagtttttgttggaagggggtgtttatgtttttttaatggttttaatatattagtggaataaatttttaagattttatattttttgtttgttttgaatttattgtgagtgaaaaatagagaaaatttttaagtttaagtttttgatagtagagtgtgggagttagagtatggggagtttagaggttttagatttttaaaggtttttattagggttatttttgttagtggtggtggtagttttttttgtggttttttttttttttttaaggggttattttgtattatgttgtttttttttatttattttgttttttttttataggtttatttgtgttgaatttttgttagttttgaagttggtgagggagggggtttatttgtttgattgttggtgggtttgagtttatagaggtagaggagtaagaatttgtgatattgaaagttatttatatggggtttttttgaaggaggatgtggaaggtagaaagtgatttgttttgagtggtgtatgtaattgaggattttaagttggattatggggtttggatgattttttaaattaggaaattgattttattttttttttttttgttttttttttttgaatttttagtttgtatgtatttatattttttggtttttttttttagttttgggtttttttttggtaaatagatttgtaggtgtttaagttatgttttatttttatttttttttaggagaggagatagggttaggattttatttgattgtgggttataaatatttggttgtggtggttgttgtggggtttttaggagagttggttttgggagggaaatgtttttgaggtagtggtggttgtggtttattattaattgtttgttattgattttattatttgttattgatttgttgtttggagttttggttttgtgggttgtttagattttaggtttgtgtgtttaattgtggagaatgtgttggtaggttttttatttttagtttaaggtgtaggaaggattagtatgaatttgttggttttgttgtgtggttaggagatgagttttattgggtattgagtttaggtataggatattagagaatgaatatagaggtagaggtttttatgttttttttagagttttggttttgtaaagagtttgtttgtttttagtttttagaattttgtattgtgaatttgtttatgtggattgggaaaatagggttggtattattttgttattttgtttgtgtttgggaagggttaagtatgtaaggttataaatatttattttattgggattttaaatgtttaataaattatgatttgttttggttagaattattagaaatattaagggaagatttagagagtttgggggaggaaattaatggtgaattatttaggtatttttttaaatttttttttttttggaaggaaggattgattaggggtagtttgttggttttatttttatatgatagaaaaattattgtattaaggatgggtgtttttaagattagtgggtatattttatggggtggataaggagggaggaagagatagtttttataattgtttatttatttagttgttagttgagaaaaatgttaaatggatattatagttatataatgaatttgtttgtttttttttttttagtttttttgttgttattagggtgagaggtgtaatggaagggggtttgagagaaagtttttttgtaaagggattgttttttaaatttatttataattagtttaatttatgaaagtggtttttaaagtgttttatagagttttagatagaaaatatgaggttaatgattatggtagttagtattggttattgtgattattgttattgttaggatgaatgattatgattgggttaggttttttgggaattttggtggagtgggttgttatatggggttttgtttttttgtatatattgggtatttaggttgtttttgaggaatagtttagtagttagtggtttgggaagggtgttgtttttaggggttttttagtagagtttttggttttagtttgggtttggtaggtttttggtttttttaggatatttttatttttgttttttttatttaggtaaggagattttttaaggggtagtgttgttttttattttggtgagaatttttttttttttgatttggtggttttgaaattagatggtaatttggtgttttgagaggttggtggttgttgagattttgtgttttttgtttttggtgatgaatttgttagttgtatatttttgttttagtttttgtaattgttttttgttgtatggaatgtgttttt

SEQ ID NO: 796 - DNA, 2712 bp, Artificial Sequence
  chemically treated genomic DNA (Homo sapiens)
agaaatgtattttgtatagtaaggggtagttgtgggagttggagtgggagtatgtggttaataagtttattattaaggataagaggtgtaagattttggtagttattagttttttggagtgttagattattatttggttttagaattgttgggttaaagagaagaaggtttttgttaaggtgaagaatagtgttattttttaagagatttttttgtttgggtgggaggagtgaaagtgggggtgttttggggagattaggaatttgttaagtttaggttggggttaaggattttgttgagaggtttttagagataatattttttttaggttattggttgttggattgttttttaggagtggtttgggtatttagtatgtgtagggagatggaattttatgtgatagtttattttattagggtttttaaagaatttggtttagttataattatttattttgatagtggtaataattatgataattagtattagttgttatgattgttagttttatattttttatttagagttttgtagagtattttagaaattgtttttatgaattgagttaattatgaataaatttggaaggtgatttttttgtagggaagtttttttttagatttttttttattatattttttattttggtaatagtaggaagattgaggagaggggaatgggtagatttgttgtgtggttgtgatgtttgtttagtattttttttagttgatagttgggtaggtggataattgtagaggttgtttttttttttttttttgtttattttatagggtgtatttattggttttggaagtatttatttttaatatgatgatttttttgttgtgtgaaaatgaagttagtaggttgtttttagttagtttttttttttagagaaaaagagatttgagaaagtgtttgggtaatttattattaatttttttttttaaattttttgagtttttttttaatatttttggtggttttgattaaagtaggttatggtttgttgagtatttgggattttagtgaagtagatgtttgtagttttgtatatttagttttttttaggtataaatggagtggtagagtggtgttaattttgtttttttagtttatgtagatagatttatagtgtggaattttggaagttggagatagatgggttttttgtagagttgggattttgagagggatatgagggtttttgtttttgtgtttattttttgatgttttgtatttgggtttagtgtttggtgggatttattttttggttgtgtagtaaagttagtgggtttgtgttggttttttttgtattttaggttgggggtggggggtttgttggtgtattttttatgattgagtgtataggtttgaagtttggataatttgtagaattgaagttttgagtagtgggttggtggtgagtagtggggttggtggtgagtagttggtggtgggttgtggttgttattattttgaggatattttttttttggagttagtttttttagaaattttgtggtggttgttgtagttaagtgtttatggtttgtggttgggtgggattttagttttgtttttttttttgggaaggagtgagggtgggatgtgatttagatatttataaatttatttattaaagaggagtttgggattgagggaaaaggttaaagagtgtgagtgtatgtggattgggggtttaggggaagaggatgaggaggaggaagatgaggttgattttttgatttaaaaaattgtttaagttttgtggtttagtttaaggtttttggttatatgtgttgtttagagtaggttattttttgttttttatgtttttttttaaggaagttttatgtgggtagtttttaatattgtaggtttttatttttttgtttttataagtttaaatttattaatgattgggtaagtaaatttttttttttgttgattttggaattggtgagagtttagtgtagatgggtttgtggggagggggtaagatagatgagggggagtggtatggtgtggggtgattttttggagagaggaaaaaggttataagaggggttgttattgttattaatggagatggttttggtagagatttttgggggtttggaatttttggattttttatgttttaatttttatattttgttattagaaatttaaatttgaggattttttttgttttttatttgtaataaatttagagtaaataaaagatgtggaattttagagatttattttattggtgtgttaggattattaaaaagatgtgggtgtttttttttgatagaggtttattattttaggagaatttgtgggtaggtttttattgtttgtggagttataggtttttagtggtttggggttttgtgggtattgagttgtgtgtgggggtttaggatttgatgttgtttgttatttggttagggtattggtagatgtattggtttagtttttgagagatttaggaagaaggtaaggaggtttggtatgagttattttgaatggaagaagaaggtggttggtttgtgggagttaggttgtagagttatttgttttttgtttatgttttttttattttttttgttataataattagtggtgtggatttttttatatatatttttttttggatttatttgtatggaatttgtgtaaaaaatatttaattttgttttgtattaaatgtttttattg

SEQ ID NO: 797 - DNA, 2207 bp, Artificial Sequence
  chemically treated genomic DNA (Homo sapiens)
agattattgtagtaggttttgtattaatttattgtaaaaaataattttaattgtgatggtattttaatggttatatataaaattatttttgaaatgtattttatgatggttgtttagggggaaatatattagttagtagatatggttaatgttatttttatttaatttaagaagtaataatagaattaatgaaaatagatttatattttaaagaaataaatataataaattgaaaaagaaggataaaagagattattggaaatataagaaattattagattgaatttatttagtttgtttaatttttttattttttaggaaaaaatttttgaaatttgtttttttggaaatatattatataatttaattataaggaaagtgatgttttaattataaattgttgttatgaatagtgtaaattttaaatttgttaataaatttattttaaattaaatttaagtttataatttagtaataattttgttaatttatttgtaaaattattattttaaagtgattgttttaagttaagttaaaaaataggtttatttatggtaagtggttagattttgtggatttatttatttttatttgtgaattaatatagtagttttgtaatattgatttatattaggaaattatataattagtggagtttgaattgataaataaaaatttggatattgttatagataggatatgtagaagttgtttaattggtttgatttattttttgggttgatattttagtaatgtttttattttttaataatggtgagttttttagtatatgttgttatatagattaatttaattttaaaggtggggatttgattttttttgtttattaagagtttgtttgtttgtaagattttagtgtttttgtagtttttatttttttttattgtttttaatttttttttaggttttttggatttgtattttttaggtgattgtttgttagtttggggtgtgtgtgtgtgtgtgtgtgtttatgtgtgtatgtgtgtgtgataggggtggtatttatttttttaggtatgtaaggtttatttattttgatttgattttttgttatttttaatgaataggttaaatgagtttttttgggttttgttaagtattttgtttgtttgaaagttttttttagggtgaagatttgttgtttggaaaaagtgggttttgtgtgttttttttttttgtttttgtttaataaaatggatttttgatttgtgagaattaataaataatgagagagggggaaaaataattggttataagtggttgtattagggggaaaaaatgaatttgaaaaataatgttttgtggggaaagaaagtttagtttgtggtggatattagaagtgtagtggtgtttttagattaatggtatgtttttttttgtttttttatatttatttgttttttaaaagttgtgtgtttggtgtagtagtaaatattttttgtttaatattgatgttaaatagttagggagtttattgttaaagtttgttagagtttaattgtaaggttttattaaattaatgattgttagaaaaaggttatttttgttttttaatttagttggtgtttgtttggttttggagtttttaagtgagaataattagattttttttttttttttttaatgtttttttaatttgtgtttaggtaataaaggggtttttgtttttgtatataagagagttaaattgtttttaagtttaatgttgttgtagttgagggggagaggggaagggggagggggtatagtttttgttggtggtttttaatatggttattaaaattgatataatagtgtttttttggtatttttattaggtttggttgttatagtttttgggttttttaagagaatttttatttggtttttgtaattttttgtagttattgttgtttagttgtattaaggaggtttggagatttggaagaaattttggagatttgttgaaaggtgaagaattgagtgagaaaaggattttaggttgggttttgaagtttatttggaaggttgggagtttttgtggtgttgtggtttattattttgaagattagtgtgattttggggtaatttagtttgttttaagtaaggtttttgtgggatggtatattttttttaggttgtgtttttttattttattttttttttggtttgtttttgtgttagggtgttgagttttatgatgt

SEQ ID NO: 798 - DNA, 2207 bp, Artificial Sequence
  chemically treated genomic DNA (Homo sapiens)
atattgtggagtttaatattttaatataagagtgagttaggagaagagtgagatgaagggatatggtttggggaaaatgtattattttgtaaagattttgtttgaggtaaattgagttgttttaagattatgttagtttttggggtagtaggttgtagtgttgtggaggtttttagttttttaggtggattttagggtttagtttggggttttttttttgtttagttttttgttttttagtgagtttttgaagttttttttaagtttttggatttttttagtgtggttgagtggtagtaattgtgggaagttgtgaaagttaagtggaggtttttttgggaagtttggggattgtggtagttgggtttggtgggggtgttagggagatgttattgtattggttttgatggttgtattaggggttgttaataaaggttgtgtttttttttttttttttttttttttttggttgtagtgatgttagatttgggggtgatttagtttttttgtgtgtaaaaataaggatttttttgttgtttggatataggttagggaagtgttgaaggaaaaaaaaaaaaatttagttatttttatttaaaggttttggggttgaatgagtattgattggattaggaggtgagagtggtttttttttggtagttgttaatttaatggggttttgtgattaggttttggtaaattttagtaataggttttttagttgtttgatgttggtgttgagtagaaggtatttattgttgtgttaaatatgtggtttttaaaaaataggtggatgtaaaaaagtaaagggagatgtgttgttagtttggaagtgttattatatttttggtgtttgttatagattgagttttttttttttataaaatattgttttttgagtttgttttttttttttagtgtagttgtttgtaattgattgttttttttttttttttgttgtttattggtttttatagattaaggatttattttgttggataaagatgggaagagaaaatatatgagatttattttttttggatagtagatttttgttttggagaagatttttgaataaataaaatatttggtggggtttgagagggtttgtttggtttatttgttggggatgatagagagttaggttaaggtgagtggattttgtatatttggagggataggtattgtttttgttgtgtgtgtgtgtatatatgggtatatatatatatatatatattttaaattaataaatagttgtttgggaggtgtgaatttaaggagtttggggagaagttgagagtagtgaaggagggtggggattataaaggtgttggggttttgtaggtgggtaaatttttgatgaataaaaggaattaagtttttgtttttgaaattaggttaatttatatagtagtatgtgttgggggatttattattattagagaataaaggtattattgaaatattagtttagagaatagattaggttagttagatagtttttatatattttatttgtagtgatatttaagtttttgtttgttaatttaggttttattagttatataattttttaatgtagattagtattatagggttattgtattaatttgtaagtaaaaataaataaatttataggatttaattatttgttatagatgaatttgttttttagtttagtttaaggtaattgttttggaatagtaattttataaatgaattgataagattattattgaattataggtttgaatttggtttaaaataagtttattaatagatttaggatttgtattatttatgataataatttataattaaaatattattttttttataattgagttgtatagtatatttttaaggaaataaattttagaaatttttttttaaaaaataaagggattaaataagttgggtaaatttaatttaatggttttttatatttttaatagttttttttgttttttttttttagtttgttatgtttgtttttttggggtgtaagtttgtttttattagttttattgttgttttttaaattaagtaggaataatattagttatgtttgttggttagtgtatttttttttggatagttattataaaatatattttaggagtgattttgtatgtggttattaggatattattatagttaaaattattttttgtagtaggttggtatagagtttattgtgataattt

SEQ ID NO: 799 - DNA, 2460 bp, Artificial Sequence
  chemically treated genomic DNA (Homo sapiens)
ttggaaaggttttgtattagaggttaaagtatttggttttagtaaatgattaagtgtttgaaatagttagttttgtgttttagagaaatattttatatattttaaggttagtggggatttaatttgagtataaattagtaggattaaattatgatatatatatagagaatatttttttttttaaattagattttttgattttatagaattatttaattttttttgtttttattatgatttgtgggtatttgattttattgtttatggaattttagatttttttgtttgaaagggaagggatggttaggtgtagtggtttatgattataattttagtattttgggaggttgaggtaggtagtttatttaaggttaggagttttagattagtttggttaatatagtgaaattttatttttattaataatataaaaaattagttaggtatggtggtaggtatttgaaattttagttatttgggaggttgaggtaggggaattgtttgaatttgggaggtggaggttgtagtgagttgagattgtgttattgtattttagtttgggtaataaaagtgaaattttgttttaaaaaaaaaaagaagaaagaaaagaaaagaaaagaaaaaaagaaagggaagggattttttttgtttaaatgttatttttgggttaggttgttgtgttttttttttttaatgttggtgattagaaattttttgtttttttgttatggtggtgggtatggtgatgtggggtatagttgggagttttaggtttatatgggagatttaagattgtatttttttaggaataaagttagagtttttgtttaaatttttatatttagtttaggttttgatttgtagaaggttttttataaatgtttgttgaattgttttgtgttgttgggttatgtgaggaaaatggaattaagagtttgttgatttggagggttggttttggtgtattattgattggttttagggttttgagttggggatttaattttttggttttttgatttttttgttggtaaaatgaatttgatattgttttgattgtttttgtttagtaggggtgagttttattagaggttgaaggtgtgagaaaggtatagagtgttgtttaggtagggagttatttgggttgttattttttgtgtttgttggagattgtaagttaggagagttggtttagttgttagtaattatttgtgttttgaatataatatttgtgttttatttttgtataggtagatggtgtaatttggttgtgttgtatttttttgtattttatttgtggtggttttgttgtgatagtgtttgtgttaggtgttggtgtgtaggttggtttgggatgttgtgattgtagttggtaggaatttgtgtgaggggaaaggggtgttgggattaggttatgggatgtttaaggtattttttttaagtttaagggaataaggttagttttttttggatttttaaaatttttttgaaaggagagtagggagtaggtattagttttttgtgttttatgtggagagattggggtttagagagatgaggtggtttgaggatggatatatatatattaagtgatgggggtggagggaagtttaagtttttaattttgggtttattatttttttttgggttggtattgttttgattgtatagattagttgatttgttttgggtaagggtggaatttttttttttgtttagggttggttttgtttttttttattttgtggttttgttatttttgtgttatttagtttttttttaaatattatgtttattttatatattttaaggttagtggggatttgagttaagtataaatttgtaggattaaattatgatatatatataaagaatatttttttttttttttttttttttttttttgagatggagttttgttttgttgtttaggttggagtgtagtggtgtgattttggtttattgtaggttatgttttttggatttatgttatttttttgttttagttttttgagtagttgggattgtaggtgtttgttattatgtttggttaattttttgtatttttagtagagatggtgttttattgtgttagttaggatggtttttattttttgatttagtgatttgttttttttggttttttaaagtgttgggattataggtatgagttattgtgtttggtaaaagaatatttttttttaaaagtagattttttagttttattgaattatttaattttttttgttttttaagaattgtggggagttgattttattgtttatggaattttaggtttttttgtttgaaagggaagggatttttgttgtttaaatgttatttgagttaagttgttatgttttttttgtagtttgtaattatttatgttggtaattagaaattttttgttttttttttattgaaatttattagttttttgaaggatttagttgtttttat

SEQ ID NO: 800 - DNA, 2460 bp, Artificial Sequence
  chemically treated genomic DNA (Homo sapiens)
atagggatgattgggttttttaggagattgatggattttagtgaaagagaagtaaggagtttttaattgttagtataggtgattataggttgtaaagaggatatagtagtttgatttgggtgatatttagatagtagaagtttttttttttttaagtaggagaatttaaaattttatgagtagtagggttagttttttatgatttttggggaataagaagagttgggtagtttaatggaattgaagaatttatttttaaaaaaaggtgtttttttgttgggtgtgatggtttatgtttgtaattttagtattttgggaggttgaggggggtagattattaggttaggagatggggattattttggttaatatagtgaaatgttgtttttattaaaaatataaaaaattagttgggtgtggtggtaggtgtttgtagttttagttatttgggaggttgaggtaggagaatggtgtgaatttgggaggtgtagtttgtagtgagttgagattgtgttattgtattttagtttgggtgatagagtgagattttgttttaaaaaaaaaaaaaaaaaaggaaaaaaaagtgttttttgtgtgtatgttatgatttaattttataggtttatgtttggtttagatttttattaattttagggtatgtgagatgggtgtggtgtttgggaggaggttgggtggtataggagtggtaaggttatggggtggaaggaggtaaagttagttttgggtaaaaggaagaattttatttttgtttaagatgagttagttggtttgtgtagttagagtagtgttagtttggggaggaatggtggatttggagttagagatttgggtttttttttgtttttattatttaatatgtgtgtgtttatttttaggttattttgtttttttgagttttagtttttttatgtggaatgtagggagttgatatttgttttttgttttttttttagaggggttttaagaatttaggagaagttggttttatttttttggatttgagaggggtgttttgggtattttatggtttggttttagtgtttttttttttttgtgtgggtttttgttggttgtagttgtagtgttttggattagtttgtatattgatatttggtgtgagtgttgttatggtaaggttgttgtgggtggggtgtgggagggtgtggtgtggttagattgtattatttgtttgtgtggaagtggagtgtaggtgttgtgtttggggtgtaggtaattgttgatggttgagttagtttttttggtttatggtttttagtgggtgtgggaggtggtagtttgagtggttttttgtttggatagtgttttgtgttttttttatgtttttagtttttagtgagatttatttttgttaagtaagggtggttagggtggtattagatttattttgttagtgaggaaattgagaagttgagaggttaaatttttggtttaaggttttggagttagttaatagtgtgttggaattagttttttgggttagtggatttttaattttattttttttgtgtgatttagtaatgtagggtagtttagtagatatttatggagaattttttatgggttagggtttgagttaggtgtaggggtttggatgggggttttggttttgtttttgagagggtgtaattttaaattttttgtgtggatttgaggtttttagttgtattttatattattatgtttattattatggtagagaagtaagaagtttttaattattagtgttgggaaaagaggatatagtagtttgatttaggagtgatatttagatagagaaagttttttttttttttttttttttttttttttttttttttttttttttttttttttgagatggagttttgtttttgttgtttaggttggagtgtagtggtgtaattttggtttattgtaatttttgttttttgggtttaagtgatttttttgttttagttttttaagtagttgggattttgggtgtttgttattatgtttgattaattttttgtattattagtagagatggggttttattatgttggttaggttggtttggaatttttgattttaggtgaattatttgttttggttttttaaagtgttgggattatagttatgagttattgtgtttggttgtttttttttttttaagtaggaaaatttaaaattttatgaatagtagggttagatatttataagttatggtagggataagaagagttgggtagttttatgggattaaagaatttagtttaaaaaaaaaggtgttttttgtgtgtatgttatgatttaattttattggtttatgtttgggttaaatttttattaattttagggtatgtgaggtgtttttttggagtataagattggttgttttaaatatttggttatttgttggggttagatgttttggtttttggtgtaaggtttttttga

SEQ ID NO: 801 - DNA, 2493 bp, Artificial Sequence
  chemically treated genomic DNA (Homo sapiens)
ttttttatttattaaaatgttagttttttttgggtattaggagttggtggttatttgtttggtattggagggggtgggggtatggtttttggtgatgtataggattatagtagttagtgtataggttaatattttagtggaggagatttatgtaatattttattgtttttttaggagattttaggttaaggattagtatttaagagtatgaattttgtttggtattaattagaattgtgttgaggaggttgttttttaggttttaatgagatgatgtttgtttagataattattagggttttttttttgaaatataggttttttttgggggttggaggttttgttagtattttatgattttggaggtgtggaggtttttttgggggtggggggggtattgtgagtggtgtgtgtattgagttttgtttgttttagattttggtatttttgttattttttttaagagtagagtttaggaatagagaggtatttttaaaaaggaaataaggagagttatgtgttagtagttaggttttgtgagggttggaggatagggtttatggtgttttttgtttgggtgagggttttatgtattagaagttgtttaggggattggtggtatttttttgttttgggttttttttttttattgaaagtaaggaggttggattgtgtggttattgaggttatttttggttagaatatgttagaatttttatgtagtagtgtatttgtaggaagttgttttaagttagagaatattggggtgttattgtttttttagtgttgtttttttgtttttagtttgtttttagttaaatgaaatgggatggttggttattgattttagtgtaaagaatggggtttgatttttgttttgggtatttgatgatgtgtttgtggtaaataggataagttattataggttaataggaatagggtgttggaagttatagagttttatatggtagaaggggtatgtatagggttttttttttattaattagtggtgtgtttttagggaatatgagaaggaggtgtagaattggaagagaggtaagaggttgagaggttggttaaggaagtttattgttatgtttttttgtagttggtgttttaagtttaaggtgggtggttgtgttgggtatgttgattttattttttagtatttttttggtgtagggggtaggtagagggagggtttggggtttttaggaagggggtggtatttttgttaatagtttgtttttttatttggaaaataggagttttttttttttttgttttttagtttttgttgttaggggttttagttggttgagagtttttttttgttttttttaggggttttttgttttagtttgttttgtatgtttttttgttgggtggtagggttaaattgttgtagataagtattttttttttttagggggtttttgggggatggaaaggaataggaagtatgtgtatagtaggtgtttataggattgttggttggatgtgatttaaaagtttaagatttgggggttattttgggtttatttgtgggtgtattttaaattgaggtggttatgaaaggtagggttgattgaatagttagggggtgttaggaggggttttggaggagggtagaggtagtgtgggttgatgatgtgttttggtttttttgggattgttttgttatttttttttgttatagtgatgggtttattttgttataggtatgtatgtgtttttggggtttgtggtagggttttttttttttttgaggataggtgaggtaggataggatgggggaggagggtttggttttagttttgggtgtggttttgatttttttttttgggtattgtttttggatttttgtgtgttgtggttatgagtttagttattaattgaatttgtttttttaggaggattttttgaatgaataggattttttgttgtagaattttgttggttggtttatattggttttatgttattttgaaaattttttttttgagtaggattgtgggggttgtaggagttttgttgattgaggagtggttataaggtagtgattgatgttttgtttgaggaggtttgaggagattatttttgttgaagttgggagaatggggtggtagggaggtggtgttggatttgatttttaaagtatatgttgtagaattttgatttagtaggtagtatggtggtttgtaaaatataaggatatttttatttaatattggtggtgatatttagaaggtgaggaagatagtggtttatttatttgtattttggaaggtttagattgggaaatggggatattgaagtttatttggtgtaggttgtaaagttgtgtatgttatttaatatgatttgtaattttttgagttttgaaaattgtgatgttttggatatagttttttttgaatgtttgttttatagtttggagttaaatttgtattttttttgaaagttgatggtggatggggatgttatggtgtg

SEQ ID NO: 802 - DNA, 2493 bp, Artificial Sequence
  chemically treated genomic DNA (Homo sapiens)
tatattatgatatttttgtttattattagtttttaagggggatgtagatttagttttgggttgtagagtagatgtttaaagggaattgtatttagagtattatagtttttaggatttaggaggttataagttgtattaagtagtatgtatagttttgtagtttatattaagtgggttttagtatttttattttttagtttgagttttttaggatataggtaaataaattattgttttttttgttttttggatgttattgttaatgttaaataagagtgtttttgtgttttataggttgttatgttgtttgttgggttagaattttatagtgtgtgttttaggagttagatttaatattgtttttttattattttgtttttttaattttaataggagtgatttttttaaatttttttaaataaggtattaattattgttttgtggttattttttagttagtagaatttttgtagtttttataattttgtttaaaaggaagatttttaagataatgtaaggttagtgtagattagttaataagattttatagtagggaattttgtttatttaggaaatttttttggaaaggtaggtttagttagtgattgagtttgtggttataatatgtgaaggtttagggatagtgtttggaggagggaattaaagttatatttgggattgaggttaggttttttttttttattttgttttgttttatttgtttttaggggagggaggggttttattatggattttaggggtgtatgtatatttgtggtggggtgagtttattattgtagtgaggaggggtgataggatagttttgagaaggttaaagtatattattagtttatattgtttttgtttttttttaaggttttttttggtattttttggttatttagttagttttgttttttgtggttattttgatttaaggtgtatttgtaggtgggtttggagtagtttttaaattttaggtttttgagttatatttagttggtaattttatgagtatttattgtatgtatgttttttgtttttttttgttttttaaggattttttgggagggaagagtgtttgtttgtagtagtttgattttgttatttagtagagaggtgtgtaggataggttgaagtaggaagtttttgggaggggtggggaggaatttttagttggttggggtttttggtagtagaagttgagagataggaagaaagggggtttttgttttttgagtagagggatagattgttggtagaagtgttattttttttttgagggttttaaattttttttttgtttgttttttatgttaagggggtgttgggaggtggggttagtatatttagtgtagttatttattttgagtttggagtgttggttgtaggaggatatggtagtgagtttttttggttggttttttggttttttgttttttttttggttttgtattttttttttatgttttttgaaggtatattattagttaatgggggagaagttttgtgtgtattttttttattatgtgggattttatggtttttagtattttatttttgttggtttgtaatagtttattttgtttgttgtaaatatattattaaatatttaaggtagagattagattttattttttgtattagggttagtaattagttattttattttatttggttaaggataagttgaagataggaaagtaatgttgggaaaataatgatgttttagtattttttgatttaagatagttttttgtaggtgtattgttgtatggaaattttagtatattttaattagaagtggttttggtggttatatggtttaatttttttatttttaataggagaaggaagtttaggataaggagatgttattaattttttgggtagtttttggtgtataaaatttttatttgggtaaggagtattgtgggttttgttttttagtttttgtagagtttggttgttggtatatgattttttttgttttttttttaaaaatatttttttgtttttaaattttatttttgagggagatgatagaggtgttgaggtttgaggtaggtaaggtttaatgtatgtattatttgtagtattttttttgtttttagaagagtttttatatttttagggttatgaagtgttagtagaatttttagtttttagggaaagtttgtattttagaaaaggggttttggtaattatttgggtaaatattattttattggggtttggaaggtaatttttttaatatagttttgattagtattaggtaaagtttatatttttaagtgttggtttttaatttgaaattttttaaaaggataatgaagtgttgtatggattttttttgttgaaatattaatttgtgtattgattgttgtgattttgtgtgttgttaagggttatatttttattttttttaatattaagtaggtaattgttagtttttagtgtttagagagagttaatattttggtggatggagaa

SEQ ID NO: 803 - DNA, 2358 bp, Artificial Sequence
  chemically treated genomic DNA (Homo sapiens)
tgatttttttatatttatggatttttttagtgttttttattttagggaatttttgttaattaattaagttgaaatttggaaaaaattaagttaagtggtgtttttaataaatggagattatgtgagaaggtttaattttaagtgggggagggtatagaaattaataattggtttttaattaataaatatatttaggtatgtttgtaaatgtttgtatattttgtaagattaaattatatataaatttgtgtttttaggtttattatgttgtaattaattattaaattattatgtttgtttttattgattgttttaaaaattgagaatgtataagaataatttggatttttttttgttaaaatgtagagttttgttttattttttgagggggaataaaatttttttttttttttttaaaaagttttgggggtatagaaaaatattgttttattttgaagtaaatttaatattatttaaattgatgaattttaaattgttgtgttttgattggtatgtatattgtatatgggtttttgataattaagaagtgttaaaatagagggagggaaaaaaatagtggaagaagtaagttgttgagtgttttggttgggatttttgatgttaggtgtgtttggtagtagtgtttgagggtgaaatgggttttaaagtgatttagtggaggtaggaaatttattttttgttattttttggattttgtgttttgtttttttagtttgtggggggtggagaggtggtttaggtggtgatgtttggttatttatattggtattttttatagttatttaaagaaggttttgttttttagtaataatatttttgtttttgtttttttagtattaatatttttgtgttttttattttttggttgtattttttttattttttttttttgagaggtttggttattggtttgggagttgggttggttgttttgggagtggatgaggaaggttaggagaagtagtgagatagattttaattttataattttatttttttttggtagggttttggtgttttgggttatgttgagagtgaatgtgggttgagtggaggatatagagtaaaaagtgatgtttgttgtatatataaatttgtatttgttgtttgtttgggtattgtttgttttggtttttgtttttttttgaggttgggtaagtttaaaagtttttgaaaggggggtttaaagaggggtgtttagtgtatgtgattttgttttatttagggtgttgggggtggggagattttttattggatttggtttttttagtagaattgttttattttttatatttatgttgttttagtggttttgagtgaaagaggtaagaggtttaaaggatagaaggaaaatttttttttgttaaaaataaataaataaaataaaataaaataaaatatgggttttttaaatttgaaaagttttaagggtagagtgggtgggggagttgtaattagaatttttggttttagttttgtaagatttgtgtgtggatatttttttggggtttttgatttgttgttttttttttgttgttgtaaaggagttgtgaggggggatttataggatttgatatttagttttagttaattaatgtggagtttagggtttagttgtgtggtttaatttttgtgttgtgttgtttattggtttagaaaagttttttttggttttgtttatggttgaaattggggttggagttggtgggggagagaagtttttttgaatttgggtgttttaggttttgggttttggatgttattgtttttaggttgtgagaagagggtggtatttatgagatgttgattagttttgagattaaaaatttagttttgggtatttttaattatttgttatttagatgtttatgaataagtttgtttgttttttgtggttttggggaatttggtgtttagtgtgtgaggtttggggtggtttgttggatttatttgggtagggatgatttataagtattgatggatagatagtgatggggtttaatttagtgtatgaagaggggtgttagtttttttattgtggattaggttttagagagtggggttttagagtttagtgttaagtggaaagagagtgtgtttaggatgtatggtttgaatatttatttagtagtgaggagaaggaggttgaggtgttgattgtgttttggaagtttttttttatttttaggttgtttagtatgtttgggttgggttgggaggatttgtagaggagaagaaatgatgtgtttgatgtttgtgtttgttgggatttggtgttagtagttattgtatttttgggaaagaattgagggagtgtttagggtgattagaattagt

SEQ ID NO: 804 - DNA, 2358 bp, Artificial Sequence
  chemically treated genomic DNA (Homo sapiens)
gttgattttggttgttttggatatttttttagtttttttttaggagtgtggtggttgttggtgttgagttttagtgggtatggatgttagatgtattgtttttttttttttataggtttttttggtttggtttgaatatgttggatggtttaaagatggaggagaatttttaaagtgtgattgatattttggtttttttttttttgttgttgggtgagtgtttaggttgtgtgttttgggtgtattttttttttgtttggtgttgagttttggagttttgttttttgggatttggtttgtgatagggaagttagtgtttttttttatatattaaattgagttttattattatttgtttgttagtgtttgtgggttgtttttatttaaataaatttaataagttgttttaggttttatgtattgggtattgaattttttaaagttgtgaggggtgggtgagtttgtttgtaggtgtttgagtggtaagtgattaaaaatatttagggttggatttttaattttggagttgattgatgttttataaatgttgttttttttttgtggtttagaggtaatagtatttgagatttgaggtttggagtgtttaagtttgaggaggttttttttttttattaattttagttttaattttagttatgggtaaggttgagagagatttttttgggttagtaggtaatgtagtgtggggattagattgtgtggttgggttttaggttttgtgttaattaattggagttggatgttgggttttgtgggtttttttttataatttttttgtagtgatagaggaggagtagtgagttaaggattttggaagagtgtttatatatgggttttgtagagttgaagttagagattttggttatggtttttttatttattttgtttttggagttttttaagtttgggaagtttgtattttattttattttattttatttatttatttttagtaggagggagttttttttttgttttttaaattttttgttttttttatttggaattgttagagtggtatgaatgtggaggatgagatagttttgttggagaaattaaatttagtgaggaatttttttatttttaatattttagatgaaatgaaattatgtgtattgagtgtttttttttgaattttttttttgggaatttttggatttgtttagttttggaagagagtggaagttagagtaggtagtatttgggtgggtagtgggtgtggatttatgtatatagtgggtgttgttttttattttgtgttttttgtttggtttatgtttgtttttaatgtggtttaggatgttgagattttattgaaagaaaatagaattgtaaaattgggatttattttgttgttttttttaattttttttatttgtttttaaagtgattggtttagtttttgagttggtggttgggttttttggaaggggagaatgagaagagtgtagttgggaaatggggagtgtaagagtgttggtattggggggataagggtaagagtgttgttgttgggggataaggttttttttaaatagttgtgaaaagtgttaatataggtggttaagtgttgttatttgaattatttttttgttttttataaattaaaggaataaaatataaagtttaaggggtagtaaagagtggattttttgtttttgttgagttattttgaggtttgttttgtttttaagtattgttgttgaatgtgtttggtattgggaattttggttgggatatttagtggtttgttttttttgttatttttttttttttttttgttttgatgttttttagttattaaaaatttatgtgtaatatgtatgttagttaagatgtagtagtttggggtttattggtttgaataatattaggtttgttttggagtgagatggtatttttttgtatttttaggattttttaggaagaaaagagaaaattttgtttttttttaaaaaatagaatagaattttgtgttttaataaagaaaaatttaaattgtttttatgtatttttagtttttaaaatagttagtagagataggtatagtgatttaataattaattatgatgtaataaatttgagagtataaatttgtatgtaatttaattttataggatgtgtagatgtttgtgagtatatttgggtatgtttgttaattaaaggttaattattgatttttatatttttttttgtttggaattaaatttttttatatagtttttgtttattagaaatgttatttggtttgattttttttaggttttagtttggttgattagtaggagttttttggggtggggggtgttgggggaatttgtggatgtgaagggatta

SEQ ID NO: 805 - DNA, 2802 bp, Artificial Sequence
  chemically treated genomic DNA (Homo sapiens)
tttgtatttttatttgttttgttatttttttgttattttatttttgaaattatagttgttggtagggtttttagtttatgttagttttatttttttttttgttagtttttaaagggtttttaggtaatatggggggtttagttagagagttggtatttttagttgttttttggttgagttggggggtagttttgggggttgtggtttgtgttatggttttgttgatttaataaatagagttgtagagttttaggagagaggtgagttggttgtaggggataggaggttttttttagaatggggaagggtatttttggtagagttttttggagtaggtgagtgaggggaggagggtgtttgggagaggatggttagtatggggggtttttgggttttttggtttgtaaagttttaagggggtgtaagagagggtttttggtttggaagttaggggtgtggttattttaggaaaggaaattgttaaaggttaatgttttttatatttaataaattttggagggtagttagtattaatatttagggtgttgggaaaaggtgtgtgagagatttgaggtattttgggggtaggggagggttgggaaggtaggttggttgggatttttgtattttaatttaattttgattttttttttatgagtagagttttgatgttttggaagtttgggagaatggggagagattttggaaaaggagagtagtgtttatttaaaaatagaagagtgaggtttttagggtgtagtaggggtgggaggtgattaagtagtgtggggattgtaagtttgagttagggtgagggtggaggttgttaatagtataatgggggaaagtggatgtggttgagattttttttttttttttttagagtagtattttgttttgtatttggtttttattaatgttatttttaagggtgagtattattttaaataatggttttggggaggggtaataattaggaatttgggttggtatttgggtttaaggggtttttataggtgaaagggaaagaattaaaaagtatttgagagtgttaagaagttttgattgatatatttttatttttagatgattttgatgtgatagaggtgatgtggtaattagtttttaggtgtgggagaggtttataggtttaaggatatggtgtttgaatttaggatgttggagtttatttgttgtatagttaggtaattttagttatattttgagttttatagagggtttttttggttttttattgagggtttttgatttttttatttatattaaatttagtagatttttttttttttttttgttagtgtttttgaggttttttagaattgagttaggttattttgttttttttaatattttttttttttgttaggttttgttttaagatgtgatttttattatgggttaggtggtgttttgagaaggttaaggaaggtaggagattttattttgatgtataagaagtatgtttttttatttggattgggtttataatagttgttatagtgtaggtgagagttgtgtgggtagttgaaagtaggatgtttttgattgggggtagtagtgtagggagttattgttaggagggaggttggaaatttaaatagaggtgggtttgaggagtgaagtgtagaatgttgggtttttataggaggtagaggaatggtggagttggagaaggtagggggaaatagggtatttggatggttgtgttttattgtgaatttattttttttttttttttaggtgttttttatttatattaaggggatattttgagtgttataattttttgggtaagggtgaaatttaatttttttttatatggaatttttttggggtttgtgaaattgtgattgtgttataaaaagtggtttttagtttggaagattagggtgggtatatattggagatagttaagagttgagtatataaaggagagggaatgtgtaggaatagaggtgtttttttgggtttggttttttgttttttatttttttttttttatttttattttttagattttgattttatggatattttgtttttgttttttatggagttttgaatttttgtgtgtgtgtagatgaggggtgggggatgggtgttaggtattgtttagatttggttggggtttattggaagtatttagaatagtattattatttagtggttgtttgagggaagtatttgttggttggttgaagtttatgaagttgttttttgttagggaaaatttttggttttttatgttatatttttttttaggtgttttttgtttttttattttataagaagttttattttatgtttttttttttatttattggattttagtttttattattatttttagagatgtagttattatgtgtttgtttatagggggtgtttgatgatgatggtgtttttgtagttaaattattttttgggttttaaggtttggtttttatgtgttttattgttttggtgtggtaggttattttaagtttttttgggttggaattggtgttggaggagttttgggtgtattgtatgttttggtgttggtgttgttttatttttttgagtttttttttttgattaagttttgtttaaagttaaataaaatagaatgaatgatattttggttttattttttttattgttttgttttagtttggtttttgtatggggattttttgtttttttggtttttttgtggtgtgttttttgttggattaaggtattggggatgttgttagggttaggtttgtgagtgtggagaagatagagtgtggtgtaaaa

SEQ ID NO: 806 - DNA, 2802 bp, Artificial Sequence
  chemically treated genomic DNA (Homo sapiens)
ttttgtgttgtgttttgttttttttgtgtttgtgggtttgattttagtggtatttttagtattttgatttggtggggggtgtgttataggagagttaggagggtgggagatttttgtatgaggattgggttgaggtgaggtagtgggggaaatggagttggggtattatttattttattttatttaattttaagtagggtttgattagaaagaagagtttagaggagtgaggtaatattaatattagggtgtatgatatatttgaggtttttttgatattagttttagtttggaagggtttggaatggtttgttatgttggggtaatggagtgtgtgaaagttaaattttgggatttgaagagtaatttgattgtgaaggtattgttattgttgggtattttttgtagatgggtgtataatagttatatttttggagatagtgatggaaattggggtttgatagatggagagaaggatgtaggataaggttttttgtggggtgaagaggtagagggtatttggagagaggtgtggtatggagaattaggggttttttttagtagagggtggttttgtggattttggttaattggtgggtgttttttttgagtggttgttagatggtggtgttgttttggatgtttttagtgggttttgattaggtttggataatgtttggtgtttgttttttgttttttatttatatatatgtaagaatttggagttttatggggaatagaagtaagatatttgtaaaattaaagtttagggggtgggaatgaaaagggaaaagtgaggaatggggagttaaatttaggaagatgtttttgtttttgtatatttttttttttttatatatttagtttttggttgtttttagtatgtatttattttggttttttaagttgggagttattttttataatataattatagttttataaattttaggaaggttttatgtggagagaggttaagttttgtttttgtttggggaattatgatatttagaatatttttttggtgtaaatggaagatatttgagaaaagagagaaagtagatttgtagtgaagtatagttatttagatgttttgtttttttttgttttttttagttttattgtttttttgttttttgtaaggatttggtattttgtattttattttttagatttgtttttgtttaggtttttaattttttttttagtggtagttttttgtattgttatttttggttagagatgttttgtttttggttgtttatatggtttttatttgtgttatagtagttgttgtaggtttggtttgggtgggagggtatattttttatatattggaatagagttttttgttttttttggtttttttgagatattatttgatttatggtgaaagttatgttttgaaataggatttggtagggaagggagatgttgaagaaaataggatggtttggtttagttttgggaggttttaggagtgttaatgagggaagaaagaagggtttgttgggtttggtatgaatagaggggttaggaatttttagtagggggttaaagaggttttttgtgaagtttagagtgtggttggggttatttggttatatagtagataaattttagtattttggatttggatattatatttttgggtttgtaggttttttttatgtttaagagttggttgttatattatttttgttatattggagttatttggaggtgagagtgtgttggttaggattttttggtatttttaggtgttttttggtttttttttttttatttataaggattttttgagtttaagtgttagtttgagtttttggttattgtttttttttaaagttattatttaaaatagtgtttatttttggaggtggtgttaatgggaattaggtgtaggatagagtgttgttttgaggagagaaggagggaattttagttgtatttatttttttttgttgtgttgttggtagtttttatttttattttgatttgggtttataatttttatgttgtttgattattttttatttttgttgtattttggaagttttatttttttgtttttgggtgagtattgttttttttttttgggatttttttttatttttttaggtttttagggtattggaattttgtttatggaaagagggttaaggttaggttaagatgtgagggttttagttagtttgtttttttagtttttttttgtttttgagatgttttagattttttatgtatttttttttagtattttgagtgttggtgttggttgttttttaggatttgttaggtatgagaagtattaatttttaatagtttttttttttggaatggttgtgtttttgatttttaaattggagatttttttttgtatttttttgaaattttgtagattaggaggtttagagattttttatgttaattatttttttttagatatttttttttttttatttatttgttttgggagattttgttagggatatttttttttattttgggaggggttttttgttttttgtagttggtttattttttttttgaggttttgtagttttgtttgttgggttagtagagttatggtataagttatggtttttagagttgttttttaatttaattagagggtaattgagagtgttggttttttgattgggttttttatgttgtttggaggttttttgggggttagtaagaaaggagatgaggttggtatgagttggggattttgttaatagttgtggttttaagagtggggtagtaaggaggtggtggggtgggtaagggtatggg

SEQ ID NO: 807 - DNA, 2301 bp, Artificial Sequence
  chemically treated genomic DNA (Homo sapiens)
tataataaagaaattagaatatttgggagtaaaatttagatttgggaattatttagggaaagtttgttttgatttgtagtagagttttgggattgattttttaaattgtagttattttttatttttggttttgtgaaaaatttgagattttggttttattagttttttttttgaaaaatagggtgtgttttagttttaggtatgtaaagttaaatgttttaaattgttttgtatttgaattagttaatttaagaataagtttaatagtattgttaagtaagagtttaataatttagtgttttgtgatattttttggtggtgttgattgtttgtttgggatattggtttagaagtatggtatagggtgtttttatattttagaaattaagatagtttttaggttagaataaagtttattttggattgggtataattttattttatttttgtgatttttttttttgttttttgttttttgtttttttttttttttttttttaatttttagtgtgttattttaatgttttagttttgtttgttaagtttatgtgtttgggatttgttttttgaattttaagtttgaaaagttaggaatttttgattatggatttttttttgttaaattagagggagtgaaattttgtttttttttttattttatttttttattttaaatttgttagattaagtttgttgattaggtgtgtatttaatggtagtattttttttaatattttttttattagagaggtaagtgttttatatttgtatgtaaaggtttttgagtggttaggtggagaggtttggatgtttttttttggagtgggttttggggagttgtagtagttttagttttaggtattatagttaagtgagtgtgttttgggtttgttgttttgtatgtagttggaggtttgggttgttgattttttggttatgtagttaatttgaggatgtgtgttttggggtttggttttgttttgggtgagaaggttagttattatttagggtgtaggtgttatggtttggaaatggtaatatttgagtaaataggtgggtgttgttttttggtggtgtggtggttgttggtttgtagtgtgttttagtttttggtgttgttgttgtttttttgttttgtggatttagttagtttttgggtggtttagttgggtggttttgaggtttgtttttttgggttgtggtgggaggtggggattgtagtgttgagtgtagggtgttttagttgggttggtggtttatgttgtgtttgggtttttgttgggagggtgttttggtgttaaatttgggtgggtaggggggtggagagttgattgagtttatttttatttagaatttagaggttggtggagatagagagttttttaaatggatgtaagttttttgaaagtttgggttggaagttttgaaattttttgttatgtaaagttttagttagtttttagggtttggttttggttttttttgtgtaggtttggaagtgtttgtttggtttttttattgtttggaggggtttagggttgtggatagatttggataaggttttgtttatttttagtttgttttagttgattaatggtgggattggttgtaatgtgtgttttgagattttttttaggatttgttattttaattttgtaatatgaggtaaggttatgttttttaaagtggagatattttttttgttttttttgtttttttaaaggaagtatatttttttgatgtgtttgatgggatttgtagattttagattttattgtttttttttaaaattatatatttgaaaagaatatattttgattgttgttaaaatttgttagatttttatgttttaattgttggtaatgttttaataatggaattttattatttttgtatgtgttgttgaaaagagagttttttagtaaaagtgttgtgtttatgagttttttgaggttgtgtaaggttatttattaaggattttaaaatgataggtaggttatttttggatttttaattatatgtttaaaatttaaagatttttagtttggagaggtttggttttgttttggtttggttttaaaagtttattttttttttttttttatttttaataatatagtatttaattgttttattaaattgttttaggttttggaattttggggaggtattttttaaatggtattgttttttttgtatttatgttaatataggaagttgtattagaaatttaagttgataatttaataaggtttgattaagtatatgaggtttttttaaaaaaattgatgtagtatatat

SEQ ID NO: 808 - DNA, 2301 bp, Artificial Sequence
  chemically treated genomic DNA (Homo sapiens)
atatgtgttatgttaatttttttaaaaaaattttatatatttgattaggttttattaaattgttaatttaagtttttaatgtaattttttgtgttgatataaatatagaaaaaataatattatttgaagagtgtttttttagggttttagagtttggaataatttaataaaataattaagtattgtgttattgggggtgggggggggggaggaatgagtttttaaaattaaattaaaataaaattaaatttttttagattgagaatttttgagttttgaatatgtgattggaaatttagaggtagtttgtttgttattttgagatttttgataagtaattttgtatagttttaagagatttatgggtatggtatttttattggagagttttttttttagtaatatgtgtaaaagtggtaaggttttattattaagatattgttagtgattaaaatatggaaatttgataagttttaatagtaattgaagtgtattttttttaagtgtgtggttttgagaaaaagtagtggagtttggagtttgtaggttttgttgggtatattaagaggatgtgttttttttaggaaggtaggaaaggtaaagagagtgtttttattttaaaaaatatggttttattttatattgtaaaattaaagtgataaattttggagaaaattttagagtatgtattataattagttttgttattagttaattaagataaattgaaagtaaatggagttttgtttgagtttatttgtgattttgggtttttttaggtagtgggaaaattgggtggatatttttgggtttgtataaagggaattaggattgagttttggagattagttggggttttgtgtggtagaaagttttgaggtttttggtttagatttttaggagatttgtatttatttaggagattttttgtttttattagtttttaaattttgaatgggaataaatttaattggttttttatttttttgtttgtttgggtttggtgttagggtgtttttttggtagaggtttgagtgtagtgtgaattgttagtttggttggggtgttttatatttggtattgtagtttttgttttttgttgtagtttaagggggtaggttttggagttatttagttgggttatttgggaattggttgagtttgtagagtaaaggggtggtggtggtgttgaaagttggagtgtgttgtgagttagtggttattgtattgttgggaagtgatgtttatttgtttgtttagatattgttatttttaggttatgatatttgtattttgaatggtgattagtttttttatttgaggtaaggttgagttttggggtatatatttttgggttgattatgtggttagagggttagtggtttagatttttagttgtgtgtagagtagtgagtttaaggtgtgtttgtttggttgtggtgtttgaggttggggttgttgtagttttttgaggtttgttttaggaaaagatatttgagtttttttatttagttatttagggatttttatgtataaatgtaggatatttgtttttttggtggggaaaatgttggagagggtgttgttattgggtgtgtgtttggttagtgaatttaatttagtgagtttgggatggggaagtaggatggagaggagagtgaaattttattttttttaatttagtaggaggaagtttatgattgaggatttttggttttttggatttgagatttaaagaataagttttaggtgtatgggtttagtgaatgagattgagatgttaaagtagtgtgttaggagttgggaagggaggaaagaaaagatagaagatgggaaatgagaagaagaattgtagaggtggagtggagttatgtttagtttagagtaaattttattttaatttagaggttgttttgatttttaagatgtagagatattttatgttgtgtttttaaattagtgttttgggtaaatggttaatgttgttaagagatgttgtgaaatgttgagttattaggtttttgtttagtagtgttgttggatttgtttttaagttggttaatttgaatgtagagtggtttgagatgtttagttttgtatatttagggttgagatatgttttgttttttaaaagggggattgataaagttggggttttaagttttttataaggttaaagatgaggagtggttgtagtttagaaagttaattttaaaattttgttatagattgaggtagattttttttaaatggtttttaaatttgggttttatttttagatattttgatttttttgttgtg

SEQ ID NO: 809 - DNA, 2328 bp, Artificial Sequence
  chemically treated genomic DNA (Homo sapiens)
ttttattttgaataaatttggtgtttttgatttttgtttattttttagatatgtggggatttggggttggagttgattttttgaggatattatagttttagtatttgagtttagagttatgttgtttttttttttgatgttttagggagtgtgtgagtagggagtggtgtgagtgtttgtttgtttgttgttgggtggaattgagtttgaattttggtggttggagtgttggttaggagggggtgaatgttgaggtgtgggtagtttagtgggtgggaggttgggttgaggtttgtttttgtttgtagtttagttatgtaaaagtgtttttgttttttgggaataattaaatatttttgtttaaagtggtggtgtaaatggttagttgttttgtggttatgttggatattagtagatgaggattattttgttttaattgggtgttttttatttgatgagtaagaaattgtttaggaggaagagggttttttgtttgtgtgtttttaggttttaagtgtgggttttgtgttttgagggtttttgggtgtttggtgagggggagttgtgggttgtgttttttagtggaattgggggtgttttttgtgttgttttggttaggttggggtttgtagttgagttgattattgagtggagtattgaatggtgtggattttgagattgattttggtttttgtttttggattttaaatgtttttattattgtttttgttttgttttttttttagttgttttagttttttttgtgtgttaggggttgggagggtggagtgttttttggttggttttggtaggtgtttttaagatatttgtgttggttaaggagttttttgaatttagtttttgtttttatatttttttttttttttttgtagagaaggagtttttgattatgatgaataggtagttttgagttatttaatttatttgggttttttttttttattaatagtaattatagtagagaaagttttatttatttttaaagattttagttttttttttgaagagagtttttatttttttaatataaagttaatttttataataatatttgttttttttattgtttattttttttattagggtaaagaaagtttaggatattttttgtttttttatttgtgtttgtgtttttgtgtggtttttatggtagagttggggaggttattttatgtttgtgtagggagatgtgtttgttgttggtgttgtgaaagattagagtgaagtttggttttttgttttttttttttaggggtttttttggggggtgtttttaggttttgatgaattgagtattgattattgtggtggttaagtaaggaggggaggtgatgttgggtttaagtgaattatagaggagaattggtaatgttgaatatagattttgtttgtaggtgtgatttggttgggtttgagttttgaatggggtttaattgtgaaggtggggtgggttttttagttatttagttttttttttttatttgttattattttatagttgtttgtaagtttaaggaatattaagtgtagaatgttgtatattttttttagttttaatgttatttagaaatggagattaatttttataaggtttttgtgagatttaagtaagatgaagtatattaaaatgttttgaaagttttgaatgttttttagtttagtgttagtattggagattgtggtagttattattatgattatttttatttttttttaggttttaagatttgagtaaaaggaagagttgggtgaattttttatagtttttaggttttgtttttttggtttttgttttttggtagttttttaattttttagtaggttataggtgtatgtggttggtagttttttggtttttggttttgatagtttgggggtaattaggtttgtagtttttgaggaaatttttagttttttatgttttgttttggattaggaattttttttttaataattgtgtagtaagtggtgattttgggagttgaattggagtggagtttgaagtggttggggtgggtaaagatttttgttttattttgggatataattgggatggtgttttaatttttgtttgtaggtgtgttttttgtgtgtattagtaagttttttatttattttgtttgggtttttgtagtgttttgttgtttaggttttagtgtttttattattttagtttttttttaatatgtggttttgtttttttttttagtattattgtattgttgaaaataagtttggagattaatgtattttgtagggaagagaaggatatttgtatttttaagtttatttaagtaaaggttttta

SEQ ID NO: 810 - DNA, 2328 bp, Artificial Sequence
  chemically treated genomic DNA (Homo sapiens)
tggaggtttttgtttggataagtttggagatatagatgttttttttttttttataaggtgtgttagtttttgggtttatttttggtagtgtagtggtattggggaagaaggtagagttgtgtgttgagaaggggttagggtagtagaggtgttggagtttgggtggtagggtgttgtaaaggtttaggtgaggtggatagagagtttgttggtgtgtgtgagaagtatgtttgtaggtagaggttgaagtgttgttttagttgtgttttagagtgaagtgggagtttttgtttgttttagttattttgagttttattttagtttagtttttagagttgttatttgttgtgtggttgttggggagggggtttttggtttagaatgagatgtggggggttgggggtttttttgagaattgtaggtttggttgtttttggattgttagagttggaggttggggagttgttagttatgtgtgtttgtggtttgttgagaggttgaaaagttgttaagggatgaaggttgagaagataggatttaggggttgtggaagatttatttaatttttttttttatttaggttttgggatttaagagggggtggggatagttatgataataattattgtaatttttagtgttggtattgagttgaaaaatatttaaagtttttaaagtattttgatgtgttttattttatttgaattttataaaaattttgtgaagattgatttttatttttaaatggtgttgagattggaagagatgtataatattttatatttggtgttttttaaatttataaataattatgaaataatggtgagtgagagaaagaagttgggtgattgggaaatttattttgtttttgtaattagattttatttgggatttaggtttggttaggttgtgtttgtagataaggtttgtatttagtgttgttagtttttttttgtggtttgtttaagtttggtgttgttttttttttttgtttagttattatagtgattaatgtttagtttgttggggtttgagagtgttttttagagaagtttttgggaaggaagggtaaggagttgggttttgttttggttttttgtaatattagtggtgagtgtgtttttttgtgtaaatgtagggtggtttttttagttttgttgtggggattgtataaaaatgtgggtgtaggtgggagggtggagggtgttttgagttttttttattttggtaaagaaggtaggtggtgagaaaagtgaatgttattatagaagttggttttgtattgagggagtaagagttttttttaaggagagggttgaaatttttaaaaataaataaaattttttttattgtaattgttattaataaaaaaagggagtttggatgaattaagtagtttaaaattgtttgtttgttatgattaggagttttttttttataaggaggggaaagaaaatgtgaaaataaaaattaaatttaagaagttttttgattagtgtgggtgttttggaggtatttgttggggttggttggggagtgttttgtttttttagtttttggtgtgtagaggagattaaaatagttaaggagaaagtaaaataaaaataatgataaaaatgtttaaaatttaaggataaaaattggagttggttttaaaatttgtgttgtttagtgttttatttggtagttgatttggttgtaggttttggtttggttggagtaatgtgggggatatttttgattttgttggggagtgtagtttatagtttttttttgttaggtgtttaaggatttttaaggtgtggggtttatatttgaagtttgggaatgtgtagataggaaatttttttttttttaagtagttttttgtttgttggatgagaggtgtttaattgaagtagaatgatttttatttattaatatttagtgtggttataaagtgattggttatttatgttattattttaaataaagatatttggttatttttgggaagtaagagtatttttgtatggttgagttgtgggtggaggtgagttttggtttagttttttgtttgttgagttgtttgtattttggtatttgtttttttttggttagtgttttagttgttggggtttaggtttagttttgtttggtaatagatagatgggtatttatgttgttttttgtttgtgtgttttttgaagtattagaggggaaaatagtgtggttttgggtttgggtgttggggttgtgatgtttttggaaagttagttttagttttagatttttgtgtgtttgggagatgggtgagggttagggatattaggtttgtttgaggtgggg

SEQ ID NO: 811 - DNA, 2362 bp, Artificial Sequence
  chemically treated genomic DNA (Homo sapiens)
ttagtttttggagaaagaattttataaaggatgggaaattttaaataagtgtaatttattttgggttgatttagtgttttggataatgtgttttgtttggtttgtgttttagatattttttgtaggatattgtagtttggagattttttttttttgtaattgattttatatatttaggattattattttatggtagttgtgaatatattaagaggaagaaaataagtggtttattgaattgtagtttttttatttatatgtgtgtgattttttttttttgtaagaaggaaaaaaataaaatggtttttttggagagggttagggttttttaagtatgttagggattaaaagtgggaaattgggaaaatgtaattttaatgtgttttgttttttaatggaatttatgtttgtaaaatatattagaagtatagtgtttggttttgtaagttatttttgttgttgttttttttttgttatgtggaggttggggggattgggggttggaggaggtgttttttttaatatgattgggtgtgtaatatgtttgtattaattttttatagttagatatgtgtttttgaataaaggagtagtggagataggtagagatgggggtttgatatagtttatagattttgtgttttaatagtattttataaatgatttgtttaattttaatgtttattattataagagatattggagtaaaatgagaaaattggagttatttgaattaattttttttggggagtgggggggaggggaattattaatttgaatatttgtattataaattaaatttagtaagtttgttttttataaatggatttgaagtatttattttttttaaagatgaaggttggagataaagtaatggattgaaatggaaagaaggatgttaagggtttgaaaatatatgggttttttatattgatttttgttatgttatagtaatatatttttttttttgagaaaattgtgtatgttaaattttaaaaattaaatattgaaaggatgtgtaagtttaaaagggtttaatagggttagaattttgatttgaatatattaatttatttttaagtattattttggtttaaaggtgaggaggaaggtaggtagtaaagggagaaaaagagggagattattgaattatttaataaaagaggttatttattattttaatttattgtaagatatatatttttgatataagagaattttttagaggttgaataaagtgtgtaagtatttttgagtaatgtatttgtttttggagagggggtttggaagtttaatgagggtttagtgaatagatttttgttaatttgtttatttttttgaattggagttgggttgtgatgggttgtgatttttaggatgatatatttaattagaataaaatagaaaaaaaaaatgttgtaaaagtttattaaattgttgtatttgtgtttttgaatgtgggtggtattttttttaaaaggtaaagtatggtttgtgaaggagaaaggggaaaggggaggtgggagtggggagaaggggttgtatgtatagtttggtaagggaagttttggttgagattttttggttaaggaagggtttttagtggttttttagttagggttgtgatggagtagttatttgtttagagtgttttttttttttttttatttttattttttttaagatttgtttttttgttggttgaaatttattgtttgtgtttaaatttattttttagttgtttttttttttgttttattaggaaatagtgggtgaattttgtattttaattttttttgtttgagtaggggaaggaaatggggttttaattttgttttgaaatgtgttgggttgattttattattatttgttagttagagaagggtgtggggggtttgtgttttggatttaataaagagaagggggtgttttttttaatgttttgttaaagtataaggaaattttttttttttttttggaagagatggtgttttattttattttgatagaggggggaattttaggagaaagtgtgggattaattttttttttttataaggtagggaaattaaattttatttttgtaaaataaggttgagaatttttttttatgttatttatttatgaaaagtgagaggatttttgttttttagtaaaaatatggggaagagttttttttaaaaaaataggttggggtttttattaaaagggttggagatgtattttttttttttttaatttggttttttaggggatagttaaaaaatattttttgttaaaaaatataagtgttatagagtatttatttaaatgatttttaattataaggatggagaagggatttgaatgaatttttattttt

SEQ ID NO: 812 - DNA, 2362 bp, Artificial Sequence
  chemically treated genomic DNA (Homo sapiens)
gaaggtgggggtttatttaggttttttttttatttttgtaattgggggttatttgggtgggtgttttatagtatttgtattttttggtggggggtgttttttagttattttttagaaggttgaattggggaggggggagatgtatttttagtttttttgatgaaaattttagtttatttttttagagaagatttttttttgtgtttttgttaaagggtaggggtttttttgttttttgtaggtaggtgatgtgagggaggatttttagttttgttttgtgggggtaaggtttggtttttttgttttgtagggagaggaagttggttttgtgtttttttttggggtttttttttttgttggggtaaaatggggtattgttttttttgggagagaaaaggagatttttttgtgttttggtagggtgttaaaggaagtgtttttttttttttattaagtttgaaatgtgggttttttatgtttttttttggttggtgggtgataatggggttagtttggtgtgttttagggtgaggttggggttttgttttttttttttgtttgagtagaaggagttggggtgtagggtttgtttattgttttttggtggggtgagagaagaggtggttggagagtaggtttggatatggatggtgggttttagttggtaggaaagtgagttttggagggaatgggggtggagaggggaagagaatgttttggatagatggttattttgttgtagttttggttggggagttgttgaggatttttttttagttggggggttttagttagggttttttttgttaggttgtatgtatgattttttttttttatttttattttttttttttttttttttttttatagattatattttgttttttaaaagaaatgttatttatatttagagatataagtgtagtagtttggtgagtttttataatattttttttttttgttttgttttaattaaatgtattgttttgggaattgtagtttattgtagtttgattttagtttaaggaaataaatagattagtaaaggtttgtttgttaagtttttgttgggtttttgggttttttttttgggggtaggtgtattatttaaaggtgtttatatgttttatttgatttttaaggagtttttttatgttagaagtgtatgttttataatgggttgggatggtaagtagttttttttattgagtaatttaatgatttttttttttttttttttttattgtttgtttttttttttgtttttagattaaagtgatgtttgagagtgaattgatatgtttgaattaggattttaattttgttgagtttttttagatttgtatatttttttaatgtttaatttttaaaatttgatgtatatagtttttttagaaaaaaaagtgtgttattgtaatatgataaaaattgatgtaaaaggtttgtatgtttttagatttttggtatttttttttttattttaatttattgttttgtttttagtttttatttttgaagaaagtggatattttaagtttatttgtaggagataagtttattggatttgatttatgatgtaggtatttaaattaatggttttttttttttttattttttaaaaaagattggtttaagtagttttaatttttttattttattttaatgttttttgtggtgatggatgttaaaattgagtaagttatttgtaaagtattgttgaagtataaaatttgtaaattgtgttaagtttttatttttgtttgtttttattgtttttttgtttgaaagtatatgtttgattgtgaaaagttgatgtaaatgtgttatatgtttagttatgttggagggaatattttttttagtttttagtttttttggtttttatgtaataaggaaaaaataataatagaaatgatttgtagaattaaatattgtatttttgatgtgttttataagtataagttttgttaaaagataaaatatgttgaagttgtatttttttagttttttatttttgatttttgatatatttagagaattttggttttttttaaaagaattgttttgttttttttttttttataaggaaaaaaggttatgtatatgtagatgaggaaattgtaatttaataggttatttgtttttttttttttaatatgtttataattgttgtagagtggtgattttaggtatgtaaaattagttatgggaggaagaaatttttaaattatgatattttgtaagaaatgtttgaagtatgaattgaataaaatatattatttagggtattgggttagtttaaaatgaattgtatttatttgaagttttttattttttgtaaaattttttttttaggagttga

SEQ ID NO: 813 - DNA, 2568 bp, Artificial Sequence
  chemically treated genomic DNA (Homo sapiens)
gttttttaggggttgattgttgtgtatttagtagggaagttgaggtgggtggtgttatgttttaggtttagggtttatatatttgttgggttagttttttggtgggtagtataattagggtatggatgtggtagattatttttgaaagtagggtttgagggggaaggagtgtttgtgttagtaaggttgttatttgttttttgtatatttgttgtagagaaaggggatttttatatagatttgtattatagggatgatgaaggttagtgtttttttattgtttgttggggtagaaatatagaggttgttaggttggtagttatttttgtttattagaaatttataggttgtgttttttaggagggtaggaattatagttgtttggattggatgaggaaaggtgagagagaagttgtgtttatgtttaggtttaggtttgttgtttttttgtttgtgatttttgggttgggttgttttgttggaggtttgggaattgttttttagagggatggtattaaggtttagaggaatgttagttttaggagatttaagtgggaattatgagtttgagagtgttgagattatatttggtattgatgtggtagggatgtttgatttatggttatttatagttttgtgtgtgggtgtttagggaggtgtttttttagttgtttgtttggggttggggtatttggaaagtaggatgagatgttgtgtgtttgtagttgtttttgtaggttaggatggatgttagggatgtttttgataggaattaggtttttggtgatattttttttgatatagttaggtttagttagttattttggtaggaaaggttggatttgttattaaaaagaaagagaggttaggtgagtgttttttaggtttttgtgtagaagtttatggtggaaaaagttaggggagggaggttggggaaatttttgttgtttttagtttttttttagttttaggatgtgttttttatatagtttttagaagttaaatagtaaaagtagatgttattttttgagtaaatttattttgtagttttttattaatttatagtggtatttatttttttgtagttaggaggttttgtgatttggtgtttgtttgttttagttatgttggtgtttttgttttgaggtttttgtttggtatttttaatttttaattttgatttggttttaagtttttgtattttaatttaaagagaattttttttatttgttttatttaaggtgtttgagtattttgttaaattttttgttttttttatttgttttgttggaaatttttttattgaaaattatatgtgttaagtaaaaatattaatggttaggagtttgtagaatggtttttgatttatttttgaggtggtgagtgtatagtaggaaattttgtatgtttatgtaaatatattttgtagaattggtgtggtgtggtgggaggataggggtaagtttagtagaggaaatgggagttttgtatgtgtaggatttagatttttaggtgatgaaattgtagatttggtagtgaggtgtggttgtgatttgggaatatttgttgaatgaaattttttggggtgattgttgtatttaagaatttgtgtagtttatttttttatgttgattatttttttgtttgttgaggtttatttttggtgtttttttttttttgaatttttttagtattaggttggggattaggggtttggttgttttttttagggttggtttatttggggttgttttggtgttggtgttggtgttgtgtttttttggtgtttttttgttgttttttgtgttgggtttttttggtgtttttttgttgttttttgtgttgggtttttttggtgtttttttgttgttttttgtgaggtagatatttatttggtagtgtgttagtattgagttgttggtgttttagagggagtttgtttgttttgtggtttatttgtgtttgtgtttttgttgtttgttttttgttgttttttttgtggtgtttttgggttttttggttttgtgttgtttatttgttgttgttgttggggttgttgttgttttttggttgttggtttggttgatgtagttgttttggtttgtgtgggtttttgttgttgttgttgtttgtgggtttggttttgtagttgtttgagtagtgtgtgggttttgttgtgtgttttggtttttgtgttttttggttttgttgtagttgttgtattggggtttgggtattgtgtgatgtagaatagtgttatggttagttgtatgtttgggatttgggtgtggtgtgttgtgatgatgttggtggtatgtttgtgatttgggttttgtgtaaaagatggggttggggtatggtgtgtagagatgatgttgggttttatgtgtagtggtgatgttatgggagtgttggtggttgagaatttgtgttgttttgtgttgggggtggtatggagtgggagttgggtgttgtgggagtttgttgggttttgggttgttggttggaggtggtgttggtgagttgtagtgaggttaatgttgtgtttgatattttggttgtgttgta

SEQ ID NO: 814 - DNA, 2568 bp, Artificial Sequence
  chemically treated genomic DNA (Homo sapiens)
tgtagtatggttaggatgttgaatatggtgttggttttattgtggtttgttagtattgtttttagttggtggtttagagtttggtgaatttttgtggtgtttggtttttgttttatgttgtttttaatatggaataatgtggatttttagttgttggtgtttttgtgatgttattattgtgtgtagaatttgatgttatttttatgtgttgtattttaattttattttttgtgtggagtttgagttgtaggtgtgttgttgatgttattgtagtgtgttatgtttgagttttaggtgtgtggttggttatggtgttgttttatgttgtgtggtatttgggttttgatgtggtagttgtggtggggttggagggtgtggaggttggggtgtatggtagggtttgtgtgttgtttgagtggttgtagagttgggtttgtgaatggtagtagtagtgggagtttgtgtagattgaggtggttgtattgattgagttggtgattaggaggtgatggtggttttggtggtggtggtgggtgaatgatgtggagttggggagtttggaggtgttgtagggaaagtgatggaaggtggatggtgaggatgtgggtgtaggtgggttgtggggtgagtgggttttttttggggtgttggtgatttggtgttgatgtgttgttgggtgggtgtttgttttgtagaaagtaatgaggaggtgttaggggagtttagtgtagggagtagtgaggaggtgttaggggagtttagtgtagggagtagtgaggaggtgttgggggagtgtagtattagtgttagtgttgaggtggttttagatggattggttttggaggaggtggttggatttttggtttttggtttggtgttgggggggtttgggaagaggaaggtgttgaaggtgagttttggtgggtgggagggtggttggtgtgagagggtaggttgtgtggatttttaagtgtggtggttgttttggaagattttgtttagtgaatgtttttgggttatagttgtgttttgttgttaggtttgtagttttattgtttaggggtttggattttgtatgtgtagagtttttgttttttttgttaggtttgtttttgtttttttgttgtgttgtgttagttttgtaagatgtgtttgtgtgaatgtgtggggttttttgttgtgtgtttattgttttaggagtaagttagaggttgttttgtaagtttttgattgttggtgtttttgtttagtatgtgtggtttttggtaaagagatttttggtgagataggtgaagaaagtgagaagtttgatagagtgtttgggtattttaggtagggtaggtggaggaggttttttttgagttgggatgtaaagatttgaagttaggttaaggttgggggttgggggtgttaggtagaggttttgaggtagggatgttggtgtggttggggtaggtgagtgttaggttataggattttttggttgtgggagggtgggtgttattgtgggttgatgggaggttatagagtgagtttgtttagggagtggtatttgtttttattgtttaatttttgaaggttgtatggaaagtgtattttggggttgagaaggagttgaagatgatagaggtttttttagttttttttttttagttttttttattgtgggtttttgtgtgagagtttggaaagtgtttatttggtttttttttttttttgatggtaggtttagttttttttgttaaggtggttggttgagtttaattgtgttagaaggaatgttattgaagatttggtttttattgaggatatttttgatgtttattttgatttgtagaagtagttgtgggtatatggtattttgttttattttttaggtgttttagttttgggtaggtagttgagggaatatttttttgggtatttatatataaggttgtgagtggttgtgggttaggtgtttttgttatattggtgttaagtgtggttttagtatttttaagtttatggtttttatttgggttttttgaggttggtgtttttttgggttttggtgttatttttttggggagtggtttttaggtttttagtagagtagtttagtttagaggttataggtagggaagtggtaggtttaggtttaggtgtaaatatgattttttttttgtttttttttatttagtttaggtagttgtgatttttgtttttttggagagtgtagtttgtgggtttttggtgggtagaggtggttattggtttagtgatttttgtgtttttgttttaataggtagtgggaagatattggtttttgttatttttgtggtgtaggtttgtgtgagggttttttttttttatagtgggtgtgtagaggataggtaatagttttgttgatgtaggtgtttttttttttttaggttttgtttttgagagtggtttgttatatttgtgttttggttgtgttgtttattaaggagttggtttagtaggtatgtggattttagatttggagtgtggtattgtttgttttagtttttttgttgagtgtatagtgattagtttttgggggat

SEQ ID NO: 815 - DNA, 2631 bp, Artificial Sequence
  chemically treated genomic DNA (Homo sapiens)
  unsure (1..197): unknown base
nnnnnnnnnnnnnnnnnnnnnnnnnnnnnnnnnnnnnnnnnnnnnnnnnnnnnnnnnnnnnnnnnnnnnnnnnnnnnnnnnnnnnnnnnnnnnnnnnnnnnnnnnnnnnnnnnnnnnnnnnnnnnnnnnnnnnnnnnnnnnnnnnnnnnnnnnnnnnnnnnnnnnnnnnnnnnnnnnnnnnnnnnnnnnnnnnnnnngaatttttaaatttgtagtttttttgttttgttttgttttgttttgttttttgttttgagatagagttttattttagttatttaggttggggtgtagtagtattatttgggtttatataatttttgttttttgggtttaagtgatttttttgttttagttttttgagtagttgggattataggtaggtgtttggttaatttttgtatttttagtagagatggggttttgttatgttggttaggttggttttgaatttttgattttaagtgatttgtttgttttggtttgttaaagtgttgggattataggttttagttattgtgttttgtttaaatttgtagttttgatggaatgttttgattgaagattgaatgtagaaatagtattttgggttttgttgttgttatttttttttaatttggttttttattagtttattatgtattagaatttgagagaggtgattattttgttaataaattgttatatttaatattttttggttgtttaatttagtgggaaatatagaaaaaaaggtaaagaggatatgaaattaataataaatgtattatttatattggattggaatgttttttaatatttatttatttgagggttgagggtttgtggtagaagtttttaattttgtttttagggttttgaaattgtgtaatttttttttttttaatgtaatgagtatgtgtatatatattttttttttttaggggaaattttttataatttttattagattgataattgttttagattttttgataggttatgaattataatattagttttttttttttttttttattggtttgtaaaaggatgtaattttttgaatatagtttttgtatttatttgatgaggaaggagtttttattttaaataaaaatggtgggagttgttttatatgtagttttttatgtagaaagtttggaaggttttttttattttttttttatttttgtatttttgattttggaaggattttgttttttttatgttagattgttgtttagtgttaggtattagttgggaagttggtgtgggtaggttagttgtatttggtttggagttttaggtatagggttaggggtggggtggggtggagaggtgggtgggaggaagtggagagttgagtggttatgtagttggggtagaggttttggggtaggggtggtgtggattttattgttggtgttagtttttggagtgttaggtggagtggtggaaagttagagggtttatggttgtgttattttgaatatttttgattttgttttattttagaagttaagtagggttgggtttggttagtatttgtataggaaagtaggagggtttttatgttagagggaggtttgtaaaggaagtgtggaattgggatgggtttgttattgttttgagttagaggaagggtttggatggttgagttggagggatttttttttttggtgtttttggtaaagaaaaaggaagatagtagaggagagttttgtgaggggttgttgtggggttgggggagagtgtgttggaggtagggtagttggtgaggttttaggtttggtttggatgtgggtggttttgagtagggagtggtttttggatgtgaaagattattttgttttgtaggtgttttaagagaataatttagtatgggagtattgtggtgttaggtttttttgtaaagttgttaaattatttattttttagagggaagatttagtttgtttttgtataggattttgaaatttttattattgttgttttattgttgttgttattgtagttaaatatgtttgttttgtttaaagtgttagagttaggttatatagatttgtgttttatgttaattttttttttgatattttagatttttttttttgttggattataaagttaaagttgtaggatagaattttaagatgtttaagaaattgtttatgatatttatttttaattttttagtagttggaatgtagaggagtaagtaatattatataggataatatttttggttatgttttatagattttgtttataaatttgaataattatgaaattttttttatgtttatttttattatgtttttgaaagtaaatgaaatgattagttttttgtttttttttttttagttttttaatgaataatgattaggtttggaattaatttttttagtaatattaaatgaaaaagaatgaggtagttagaatgtaaaaatagaggtttgttataatattttttttttttttttttttttttttttttgaggtggagtttggttttgttgtttaggttggagtgtaatggtgtgatttttgtttattgtaatttttgtttttagggttttagaagtttttttattttagttttttgagtagttgggattataggtgtttgatattatttttggttaatttttt

SEQ ID NO: 816 - DNA, 2631 bp, Artificial Sequence
  chemically treated genomic DNA (Homo sapiens)
  unsure (2435..2631): unknown base
aaaaaattagttaggagtgatgttgggtgtttgtaattttagttatttggaaggttgaggtaggagaatttttagaattttaggggtggaggttgtagtgagtagagattatgttattgtattttagtttgggtgatagagttagattttgttttaaaaaaaaaaaaaaaagaaaaaagaaaaaatattatgataaatttttatttttgtattttaattattttatttttttttatttaatattattgaggaagttgattttaaatttaattattatttattgaaaaattaaagaaaaaaaaataaaaaattagttattttatttgtttttagaagtataataaaaataaatatgaagggggttttatgattatttaaatttatagatggaatttataaaatataattaaaaatattgttttgtgtgatattatttgtttttttatattttaattattggggaattaaaaataagtgttataaatagttttttagatattttaaaattttattttgtaattttgattttataatttaataggaaggaaagtttgaagtattaaaaagaaaattgatgtgaagtataaatttatataatttaattttgatattttgaatagagtaaatatgtttagttgtaataataataataataaaataataataataaaggttttaaagttttgtgtaaaaataagttgagttttttttttggaaaatagataatttaataattttatagaaggatttgatattataatatttttgtgttaaattatttttttaaagtatttgtaaagtagagtaattttttatatttaaaagttattttttgtttaaaattatttgtatttaagttgaatttgagattttattagttgttttatttttagtgtgtttttttttgattttatagtagttttttgtggagtttttttttgttgtttttttttttttttgttaagaatattagaaaagggggtttttttagtttggttgtttagattttttttttggtttagagtagtggtgagtttattttaattttgtgttttttttgtaggtttttttttggtgtggggatttttttgtttttttatgtaagtattaattaggtttgattttgtttagtttttgagatgagatgaggttgggggtgtttagggtggtatggttgtagattttttggttttttgttgttttatttggtattttgagagttaatgttagtgatggagtttgtgttatttttgttttgaggtttttgttttaattgtgtggttgtttaattttttgtttttttttgtttgtttttttattttattttgtttttggttttgtatttggagttttaggttaggtatagttggtttgtttatgttagttttttagttgatgtttggtgttgagtagtagtttgatatggagaaggtggagtttttttggggttaggagtgtgaaggtggagagaaagtggagggggttttttaggttttttgtgtgagggattatgtgtgaagtagtttttgttatttttgtttagggtagaggttttttttttgttaagtggatgtaaaaattatatttgaagaattgtatttttttataaattggtaaaaaaaaaaaaaaaaaattagtattgtagtttgtaatttgttgggggatttagaatggttgttaatttggtaaaaattatggagggttttttttggaaaaaaaaaatgtgtatatatatgtttattatattaaagaaaaaaaagttatataattttaaaattttgaaaataagattaagaatttttattataggtttttagtttttagatgaatgagtgttaagaggtattttaatttggtatagatgatgtatttattattgattttatgttttttttatttttttttttgtgttttttattgaattaggtaattgaagaatattgaatgtggtaatttattggtagagtagttattttttttaggttttaatatatagtaaattaatagggggttgggttaggaaaaaataataataataaaatttaaggtattgtttttatgtttagtttttagttaaaatattttattagaattgtagatttaggtggggtatggtggttgaagtttgtaattttagtattttggtgggttaaggtgggtagattatttgaggttaggagtttaagattagtttggttaatatggtgaaattttatttttattaaaagtataaaaattagttaggtatttgtttgtaattttagttatttgggaggttgaggtaggaaaattgtttgaatttgggaggtggaggttgtgtgagtttagatagtgttattgtattttaatttgggtgattagagtgagattttgttttaaaataaaaaataaaataaaataaaataaaataaaaaaattgtagatttaagaatttnnnnnnnnnnnnnnnnnnnnnnnnnnnnnnnnnnnnnnnnnnnnnnnnnnnnnnnnnnnnnnnnnnnnnnnnnnnnnnnnnnnnnnnnnnnnnnnnnnnnnnnnnnnnnnnnnnnnnnnnnnnnnnnnnnnnnnnnnnnnnnnnnnnnnnnnnnnnnnnnnnnnnnnnnnnnnnnnnnnnnnnnnnnnnnnnnnnnn

SEQ ID NO: 817 - DNA, 2470 bp, Artificial Sequence
  chemically treated genomic DNA (Homo sapiens)
ggtaggagaattgtgtgagtttagaagtttgagattagtttgggtaatatagttagattttattttaaaaataattgtgtatttttaatatttattgagtttttgttattttttggtttagtgtatattgttttatattttttagtaaatttaggagttatgtatgaattgaaattttggttaaatagtttggttaaagttatatagtttaggtgggggaggttgggtttaaaggtaggttgttgatgttatgatttatatttgaggttattgttggttataggttttatttgaggttttgtagggggtgaggggagaaatttggttttagagatagggtttgaattttttgttgttagttagtagagaaaatagttttttatttataatgtggggataatattgtttattatattaggtagtggaaagaattaaattaatttaaataaaggagatagtgtagagtatttgatatgtaataagtatttaatgagagttattattagaggtaattttttttgtttttagtttaatgttatgttttttattatttaaggtgattattttgttgttttttaaaatattatgtatggttttttttaagatatatgtaagtgtaaaatgtagaagaaaagtatgtggggatgggggtgggggggaagaaattttgttttttttattgattagttttttttttaaaatatttttttaaggaattattaaatatttaatatggtgttgtattatgttattttaatttaaaaaaaaaaatgtgtattaaataatgaagtttttgtttttgggagtttatatataggttatgttaatatttgtaaagggttttgagtgtttaagtggttaatgaatgttttgggttggtttttttaaaatttagtttattgtttttttggtgagtatgatttgaagttttattttataatgtattgtagtttgaatttttttgttaataattgttgaaattattagaggttaaagtaattaatatgagatgtaattttattgtggtgtagttttgtgtgtttttggttgttgtgatttgggaggggggagttttggagtggttgtgtttggttttgtatttttggtagagtaggttagttttttttgggtggtaagtttttgtaaaataaaattgaaaatgagtgtttgtttttttgatagttttgtttaaaagaattttgtttatattgtaaaattttattaggtatataagtttggttggtattgttatttttagtgtgattttaatttatatatttaaagaatatttgtttggagtatgggatttggtagaaaggttaggttttttttgaaggaagtttaatttaggattttttttttttggtgttgtatatattattaatggtaaaatttttttttttagttgtagatttagatttgttgagaaaggtgttggagatgtttttaaggttatttttagtattgtgagtttagttttttgtattatgtagatttttaagaggagatgtttattgtttgtggggagttaaaattagaattttagttttttttgtgttgttattttattggtaagaatttttatattgtagatgtattgggtgtttagaattttattgatgattttattatggaaagttattaataagttttaaattagagatttgttttggaattatggagtagggagtaagggagaaattgttattttttttttaaatgtttggatttagtataagtatagaatgtagtggttgtaggtttggttgtgtttttaatagtgttgatagttggattggtggatgtattttagtattattgttaggaattaatatgtttttaatttttattgtatttttttatttttgtgtgaaatggagtggaatgttttttttagtgtttatttttaaagggagaagaattattttttattatgtgaatattttatgggggatttttattaaataaaattgtttgatgatgatttaatttgtttatttaagagaagaaattttttttatttatatattattgttgttatggtttttgttgttaaattatatataaaaagttttagttgaattaagtttattttagaaataaaaatgtttttgggatatgaattttaatgagatttttattttaaattgtgtttgaaaatatgtattgtttttagtgtttttttatatttttattaatttgttgttttaaatgtattttaaaaaagttataaaatgtatttttttataatgtgttttaggtttgtttgttgtttttttggttttaggttattttttagtgattagaaaataaaatgtgtagttaaaagaggttttttaggttgggtgtagtggtttatgttagtaattttagtatattgaaaggttaagaagggtagattgtttgagtttaagagttttttataatgtagtttttttataatgtttagatttttgttttatttatgtat

SEQ ID NO: 818 - DNA, 2470 bp, Artificial Sequence
  chemically treated genomic DNA (Homo sapiens)
gtgtgtggatgggatagggatttagatattgtaaaaaagttgtattgtaaagaatttttgggtttaggtaatttgttttttttggttttttaatgtgttgggattattggtgtgaattattgtgtttagtttggaaaattttttttaattatatattttattttttggttattaaaaagtaatttaagattaaaaaggtaatagataaatttagaatatattataagaaaatgtattttataatttttttaaaatgtatttaggataataaattggtgaaaatataaggaagtattgaaaataatgtatatttttaggtgtaatttaaaataaggattttattaagatttatgttttaagaatatttttatttttaaaataggtttggtttagttgaggttttttatgtataatttaataatggaaattataataataataatgtatggataggaagagtttttttttttgaatgaataaattaggttattattaagtagttttatttaatgggaattttttgtgaggtatttatatagtgagaaatagtttttttttttttagagatgaatgttgaaaagaatattttattttattttatataagagtggaagggtgtagtgaaaattgggaatgtgttaatttttgatagtgatgttggagtgtgtttgttaatttagttgttagtgttgttaggagtatggttgagtttgtagttattatgttttgtatttgtgttaggtttgagtgtttgaagaaaagatagtagttttttttttgttttttgttttgtggttttagagtaggtttttgatttggagtttattaatagttttttataataagattattgataaaattttgagtatttagtgtatttatagtgtaagaatttttattagtagggtgatagtataaaggaaattgaggttttaattttgattttttatgggtgataggtatttttttttaaaaatttgtgtggtgtagaaggttggatttgtggtgttggggatgattttggaaatatttttagtattttttttagtaagtttagatttgtaattgggaggggaggttttgttgttgatggtgtgtgtagtattgggggagggaaattttgagttgaattttttttggagagagtttaatttttttattaggttttatgttttggataggtattttttgaatgtgtaaattgaagttatgttaaaagtgataatgttgattggatttgtgtatttaatgggattttgtagtatagatgaggtttttttaggtaagattgttaggagagtgaatgtttatttttggttttgttttgtaaaggtttgttatttagggggagttaatttgttttgttgggggtgtggggttgggtgtagttgttttggggttttttttttttgggttgtagtagttgggggtgtgtggagttgtgttatggtgaggttgtattttatgttaattgttttaatttttggtagttttagtggttgttggtagaaagatttgggttatagtgtgttatgggataaggttttggattgtgtttattggggaaataatgggttggattttgaggaaattgatttaagatgtttattagttgtttagatatttggggttttttgtaaatattaatatagtttgtgtataaatttttaagggtaggagttttgttgtttggtatgtgtttttttttttaaattaaaataatgtagtgtagtgttatgttgagtatttaataattttttgagaaagtattttgggggaaaggttgattaataaagaaaatggaatttttttttttttgtttttgtttttgtatgttttttttttgtattttatatttatatgtattttagagaaaattatatataatattttaaagagtaataaggtgattattttaagtgataagaaatatggtattagattgaaagtagggagagttatttttaataatagtttttattgagtgtttattgtgtgttaggtattttgtattgttttttttatttaaattaatttaattttttttattgtttggtgtggtaggtagtgttatttttatgttgtgggtgagggattgttttttttattggttggtagtagagggtttagattttgtttttggggttgggtttttttttttattttttatagggttttagatggagtttgtggttagtagtagttttaagtatggattatagtattagtagtttgtttttaaatttagttttttttatttgagttgtgtgattttgattaagttatttaattagggttttagtttatatatagtttttgggtttgttaggagatatagagtaatgtatattgagttaggggatagtaggggtttagtgagtattagaaatgtataattgtttttgagatggggtttggttatattgtttaggttggttttaaatttttgggtttatataatttttttgtt

SEQ ID NO: 819 - DNA, 2359 bp, Artificial Sequence
  chemically treated genomic DNA (Homo sapiens)
taagtttatatatgaaatgaggttaataattgttttgttaatttgttgagaatattaaatgagataatgtatataaagtgtttttgtataaaatttggtatataaatatgtaaattaattttttaataagataatgtataattttggtataatggtagtttaattaatagttgttatttttttttagggttaagattgtaatttttttttattgtttaaagaataagatgagtgggtgaaaatatgtatataaattaataaaatggttgttttattaggtttgtagaaatattgaaagatatatgtttttagatatattttttttaattaaattttaattagaagtttaggattattgaggtataaaagaaggatgggatttaaatgagtgaagtaattttttgggttatagttgtaaagttaatataggaatagagtggagttagtatagtaaaggttttaagaaaatggagtttggagttaaattgtttgtatttgaattttgtttatattttttatttgttttatgattttgggtaagttattaattttattttttttttgtatgttaattttaaaaaggggtgggatagagaggtggggtgtagtttatataataatagtgtttattttatagagttatgagaagtagataatatttgtaaagtgtttagaatagtgttgggttggtatatagtagatgttatttatttttttaaaaaatttgatagtagtaagagtttttatattatgtgagttagattaagaaaggttgtggtatagtttaaaattatttttgtttattttttaaaataagtttatagtagagaataagatattggaaaatataaatatttttttatatttgaatttatttgaattttaagatgtagatatggagagtttagagtgttattagtatagggtagagaggttgaagagtttaggaatagatatagggtgggggaaaggggtaggggtaatgatgttgatttttggttaataaagtttttttaggttgtggagtaattttttttgttttttatttgtttggtttatttttggttaagaagattttgttgttaaatttttatatttagtttaggttgtagtgtatagattggtttttttgaagttttttagtggtagtttgattttgaagtttattgaggtatttgtgagaggagatgttatttagtgtagattatatttgttttgaatttttgataattgtagtttaaagaatgataaattataaaggttggaaatgtgttattgtggtttgttttttgtgaaatagtggttttggttgtgttttttttaggaaggttggaggtttttatatttttgtggttgttattttgaattttgtttgtagttttaagtgagatattaggtgatatattgttttttatgtggtaatataataatggttaatatagtgttttaatatgtattaatttattattttgtataataattttgtgagttaggtataattatttttatttaataggtgaggaaattgaagtatatttttatatttattagttgttattttttgtaaagaatatttttttttttttttgttgttttattttattatgatgaatttatggatttttttataaataattattgttattattatgttgatgtttaaattatttaaaatttggttagttggagtttttttatattgtttttttttttttttttttttgataaagtttttaggttggagtgtagtggatgtgattttagtttattgtaatttttgtattttgggtttaagtgatttttttgttttggttttttgagtatttgggattataagaatatattattatgttttagtgaggttggttttgaatttttgttttttaagtgatttgtttttttggtttttgaaagggttgggattatagaagtgagttattgtatttggttataaataggtttttatgttttttgataagtttttaatagtttttgtgtattttatttttttataaaagatattttagttttattttatattatttttattttaaatttagaattattattgttttatgaagttatagtatattagtgaaaaatggtatatagaaattaagatttggattttgggtaatgaataattttattgttattgtgtttggtattggtttttgttagtttattgtgtttagaattggttttttttagtgggtttttgttttgattttaagaatgaagttgtggatatttatggtgagtattatagtttttaaagatggtgtgtttggattttgttttttttgttgtttagatgtgtttagagttttttttttttggtgggtttgtggttttattt

SEQ ID NO: 820 - DNA, 2359 bp, Artificial Sequence
  chemically treated genomic DNA (Homo sapiens)
aagtgagattatgaatttattggaaggaagaaattttggatgtatttgaatagtagaaggaataaagtttagatatattatttttaagaattgtaatgtttattgtgagtatttgtggttttatttttgaagttagagtaggaatttattggaaggagttaattttggatatagtagattggtaggaattaatgttagatatagtagtaatgaggttatttattgtttgaaatttagattttggtttttatatattattttttattgatgtattgtagttttatgaagtaatggtgattttaggtttagggtaggaatagtataaaatgggattgaaatattttttgtgagaaagtgaagtgtataaaaattgttgggaatttattaaaggatatagaaatttgtttgtggttgggtgtggtggtttatttttgtaattttagtttttttggaggttgagggagtggattatttgagggataggagtttaagattagttttattaaggtatagtggtgtgtttttgtaattttagatatttaggaggttgagataggaggattatttgaatttggaatgtggaggttgtagtgagttgagattgtatttattgtattttagtttggagattttgttaaaaaaagaaaagagagggagtagtgtgaaagggttttaattgattaaattttaaataatttgagtattaatataataataatagtaattatttgtaaaggaatttatgagtttattgtgataaaatgagatggtagggaaaagaaagggtattttttgtaggaaatggtaattaataaatgtagaaatgtgttttagtttttttatttgttaaatggagataattgtatttaatttatagggttgttatgtggggtaatgaattaatatgtgttaaaatattatgttggttgttattatattgttgtgtggaagataatgtgttatttagtattttatttaagattatagatgggatttagagtgatgattatagaggtgtggaaatttttggtttttttagaaggaatatagttggaattgttgttttgtggagagtgggttgtggtgatgtatttttggtttttgtagtttattattttttgggttgtggttgttaaggatttagagtagatgtgatttgtgttaggtggtatttttttttatggatgttttggtgagttttggagttgggttattgttgaggggttttggaagggttagtttgtgtattgtgatttggattgggtgtggggatttggtggtagggtttttttggttagagatgggttgggtaggtgaagggtagaggaggttgttttgtagtttggaagggttttgttaattaaaagttagtgttgttgtttttattttttttttttattttatgtttgtttttgagttttttaatttttttgttttgtattgatggtattttgaattttttgtatttgtattttaggatttaaatagatttggatatgaagaaatgtttgtattttttgatgttttattttttattgtggatttattttaaagaatgagtagggatagttttaaattatgttatagttttttttagtttaatttatatagtataaaggtttttgttgttattgaattttttaaaagaataaatagtatttattatgtgttagtttagtattgttttaagtattttataaatattatttgttttttataattttatgagatagatattattattatgtagattatattttatttttttgttttgtttttttttaaaattaatatataagaagaaaatgaagttagtaatttgtttaaggttgtagagtgagtaaggggtgtaggtaggatttaaatataggtaatttggttttagattttatttttttaaaatttttgttatgttaattttattttgtttttatattagttttatagttataatttgggaagttattttgtttatttgaattttgttttttttttgtattttagtagttttgggtttttagttaggatttgattggagagaatatatttgaagatgtatattttttagtgtttttgtaaatttgatgaaatagttgttttattggtttgtgtgtatgtttttatttatttattttgttttttgagtaatagaaaaagattatagttttggttttaagggaaagtagtaattattaattaaattattattgtattaaaattgtatattattttattaaaagattaatttgtatgtttatatgttaggttttgtgtaaaaatattttgtatgtattattttatttaatatttttaataagttggtaaggtagttgttgattttattttatatatgagtttg

SEQ ID NO: 821 - DNA, 2428 bp, Artificial Sequence
  chemically treated genomic DNA (Homo sapiens)
ttggttttagtataaaagttggagtttataaaattgagtttattataaggaagtatatttataattgtttattgaggaagtggggaaagaaaaggaaggagaatgaagaaaaggaattatttttggtaagtagtaataaagaattatgtgttttggtgttgtttttattttttttttgattagtgatatttttgtttttaattttttatgatttgtattaagttagataggtataaaatattgatttttatttatatggtattttatttaaatagttataatgggatgaaattttaaaattttatggattgtaaaaatatttatttaaaaggaattaaagttggtataatatattttgtttaaagattaatattagttttaatttattttatttgtattttttaaaattagtttaatttttatggtttaatgttagttaaaaaatattatagtgaagaattattagtaaattgttaataggtatgggatttttttgaggagtgatggaaatgttttggaattagatgtatgtaaattatggtttttataatttaatgaatatattaaaatttatttaattgtatattttaaaatgataaattttatgtgaaatatatgttaattaaaaaaattagtagtggttattaatagtttttaaagttaaaaatgttttgtttttaatattttttttgaggatatggagaaatatgatatttatttttaattaggaatggagagttttttaagtttgtatttaaaatagagagtattaaaaattttatgatttagatggttttttttttggtttttttttttttttgataattatgttttttttttttttttttatgttttttagttttatttaatattgttggttaaataagaattatattttaaaatatataatgtattttaaattgatggagggttttttttttttattagtttaatttgttttaagttagaattattttatgggtgtgagaattgttggttttaagtttgttttttttagatgtttttgtattaagttagtgggattttgttttaatatgaaaatatagttgaattagttttttaaaagggaatggatatagagttttaattttgtttattttagggtaagtattataagttaaatttaggttgaaaaattaagtaaatgaataagaagtggattaatttttagagaatttgttataatttggtttttgtttatttttttattttatgttttaagatgtttttttgtttttaggtattttgttttattatttgttttgttttttttgttatttagagatagtttttgtatgtgtttttttttttggttaggttatttttttttttttagttttgttgatttttatttattttttatgtttttttggattaagttaaaatatttgagggagttttttaattattggtggtgtttttaggggtatattaatagatgttgagaaattgagggatggtggaaaattattttttagtagaggaggttttagggtattttagaggtgattttatttgagtttttttggagattttaggaaagttagtggtgggattgtgggatttatgtgtttggtgttaagggagggtttaggtattaggtgggtgtttgggtgtatgggtatgtggagatttggtgggttaggagagggatgttgggttgtaggattgtggtttgtttgttttttttaggtttgtgtttgttgtttgttgggttggttagagggagtagttttggtgagttatgttttttttgtttggattttatgttttattttttgttttgttgttttttgtatatttattatttgtttgtattgaaaggtgtggtagattgagtaggagtagtgttgttgtttagagtttggggaggtgtttgtgttaatgggtaggtgggttgggttttttggtagttatggtttgggagtgtgtgggttagtggatttgggtgagggttttggttgtgtttggggttgtttaggttattgtttagtgtgtgttatttggttttgtgttttgtgtttggtttatgaattgtaggttttgtgttgggtgtgttgagagggaggagtgtggagagttgggggaggtttgggatgtagagttggagtgtttgggttgttgaatttttgggggttttttttgtggtgttgaggaggtggttgtaatttggttttgtttttgtgttgggtatttggaaattttggtgttaaaaggggttgtgttgggttgtgtgttttgtgggtatagtggggtggagggtgagggtgtagggaggtggggagagtagttagttggttgtaaggagtttttgtttgtttgggggatttttggtgagagggtgatgtagtttgataggtggagtttttttggtagggttgttagataatgagtgtttaattttgtt

SEQ ID NO: 822 - DNA, 2428 bp, Artificial Sequence
  chemically treated genomic DNA (Homo sapiens)
gatagagttagatatttgttgtttaatggttttgttggaggggttttgtttgttagattgtgttatttttttgttaagggttttttagatgggtgggggttttttgtggttggttagttattttttttgtttttttgtgtttttgttttttgttttgttgtatttgtagagtgtgtggtttagtgtagttttttttggtattgaggtttttaggtgtttagtgtgaaggtggagttgggttatagttgtttttttggtgttatagagaagatttttgggagtttggtggtttaggtgttttggttttgtgttttgagttttttttggttttttgtgttttttttttttggtgtgtttggtgtgaagtttgtgatttgtgagttgagtgtagagtgtagagttgagtggtgtatgttgggtagtggtttgggtaattttaaatgtagttagagtttttatttgagtttgttggtttgtgtatttttggattatgattgttgagggatttagtttgtttgtttgttggtatagatgtttttttgggttttgggtggtggtgttgtttttgtttggtttgttgtgttttttggtgtgggtggatggtgagtgtgtgggaggtggtggggtggggggtggagtgtggggtttgggtagggagggtgtagtttgttggggttgttttttttgattggtttggtaagtggtaagtgtaagtttgagaggaatgaatgagttgtggttttgtgatttagtattttttttttggtttattaagtttttgtgtgtttgtgtgtttaaatgtttgtttggtgtttggatttttttttagtgttgagtgtgtaggttttgtagttttgttgttggtttttttaaggtttttaagaaagtttgaatgaaattatttttaaggtgttttagaattttttttgttaaggggtgattttttgttgttttttagttttttaatgtttattaatgtgtttttgaggatattgttgatggttagaaaatttttttggatattttggtttggtttgggaagatgtgaaagatgagtgggaattagtgaggttaagagagagagaatggtttggttagagggaaaagtatgtgtaaaggttgtttttgagtgataggaaaaatgggataaatgataaagtaaagtatttggaggtgaggggatgttttgagatatgaggtagagaagtgggtaagggttagattatggtaggttttttgagaattgatttattttttgtttgtttgtttggttttttagtttgaatttagtttgtaatatttgttttaaaatgagtaggattggagttttgtatttatttttttttgaaaagttaatttagttgtgtttttatattagaataaaattttgttgatttggtataggagtatttgaaggaagtaagtttaaagttagtagtttttatatttatgaggtagttttagtttaggatgaattagattgataaaagagaaaagttttttgttaatttaggatgtgttgtatattttaaaatgtgatttttgtttagttaatgatattgagtgaaattagaagatatggggaaaaaaaaaaaaagtatggttgttaggaaaaggggaaagttaaggaaaaaattgtttaggttgtagagtttttagtgttttttgttttaagtgtaggtttgaaaagttttttgtttttaattaaggatgaatgttgtatttttttatatttttagagagagtgttagagataaaatatttttaattttgaaggttgttagtaattattgttaatttttttaattgatatgtattttatataaaatttgttattttaaaatatatagttaagtgggttttagtatatttattaggttgtgaaaattatggtttgtatgtatttaattttagaatatttttattattttttaaaagaattttatatttattagtagtttattgataattttttattgtagtgttttttgattgatattgagttatgaaaattaagttgattttaaagaatgtaagtagaataaattggagttaatattaatttttgaataagatatattgtgttaattttaattttttttaaataaatatttttgtaatttataaggttttagagttttattttattataattgtttaagtggaatgttatgtggataaggattaatattttgtgtttgtttagtttgatatgggttatagaaaattaaaggtagaaatgttattggttaaagagaaagtaaggataatattagagtatatgattttttgttattgtttgttagaaatgattttttttttttattttttttttttttttttttttatttttttagtggataattataggtatatttttttatagtaaatttaattttatgagttttaatttttatattagaattag

SEQ ID NO: 823 - DNA, 2823 bp, Artificial Sequence
  chemically treated genomic DNA (Homo sapiens)
tgagtatgttatagagtttaatgggttaaaagggggtgatagttttatattaatttttttttgttttattagtatttttttgtttatttaggttgttttgagtttttttggttgtttttgtatttgtgttttatttggtttttagatttatgtgatgttgggtaatttgggttgggtgtgtttaggattgtaaagtgggaagtgtaggttttgtggattgtgagtggtttttgtggtttgttgtttttttttataatgtgtgttttgttttttgtgttttgggtgttttgttttggtttatttatttgttgttgagaattagatattgtgtagtagaaagttagttgttgggttgtgaggtttggttgttggagtgggtggggttggggtgttgttgagatagatttgatttttatttttttttaaatgtgttgttgaaagttgagaaggttttggttggggagtttgtgttgttttttttttttttagttttttttgtattttgagttttttagttttattttgggaggggttgtgaaattgtatttgtaagggttttatatatattttaaggagtaggttaggtaggtaattggagttggatttggatggtgagggggtggtttttggggatttgatattttggattttttatggtttagggtttaggtgggggaagaggtggtttaggatgatttggggtttttattttgttggtttgtttagtgtattttaagtttgtgtgtattttattttttttttttgtagatttaatgtttgtttggtaattgttttatttttttttgttggagagattttttttgttttgttataggtgttttatgttgtttggagttgtgtgttttgggatgggtagttttgggttttttgatgtttggttaggtttaggaaagatttgttgttttttttgttgtttttatttaggagatttggtgttttgtgttttgttttttttaatggtgttgtggtttgtttttttggtttgtttttttttagtttttattttatatggttttttttgttagttttatgataattttatttgtgttgaagattttgggtaaagaagtaattattggtttttttttttttttttatttttttggtggtaggattagggggaaaggtgtttgggatataagttttttatgtagatttattgatgtggttgtggttttgttattggtttttttttgaatggtgaggtttttttgttaattttggttttatggtataattagtataattttagtgagaggaatttagagttttagtttttttttgttttagtttttttgtgattttgattttgagggatttattttatttttttaagttttagttttttatttgtaaaatgggtagaatgatttgtatttttggggatgaagaaaatgtatatgtgagtatgtgggtatttggtgatttggagatttttgtaaattgtaggtttagtgagatggttttagtatgttttgtatttttgtttgtgtgattgttgttgggtgtttgttttagttgttgtgtttttggtgttttttttgttagggttatgtgttggggaagttaaagtgggagttttttgattttggtttagtttttagtttttggttttttgttttagtatttagatttttgtgggttaataaagttattggaaatttaatgaattttttgatattttttgaaaattgtatgtgtgtgtttttgtgtgttttttttttgattgaggtagggttttgtagggttttgtttggatgggaggttggagtggtttttttttggttgtggggttggaggatgtagagatttgaaagaaggagaaatatagagattgttaaatgaaaggagattttgtttttggaattgatttagttttttaaaagaatgaggaaaatatggggtttttatatattttggaaagttgtttaggtgtttagtgaaaaatgtaaaaggtatgtggatttttatttgtgtaaaaatataaatggggtagggggttaaatattaggttttttttgtatgaaaggttttagtgtagagggttggagatttttttttttattgtatgttttttgggattgtttgaagttaatgtgtgttgtttattatatttttgtattgaatttttaattaaaaaaagaaattgtaggaattgttttttgtttgtttgtttgttttgagatggagttttgttttgtagtttagattggagtgtagtggtgttatttaggtttattgtaatttttgttttttgggtttaagtgatttttttgttttagttttttgagtagttgggattataggtgtgtgttattatgtttggttaattttttttttttttttttttttttttttttttttagtagaggtggggttttattgtgttagttaggatggttttgattttttgattttgtgatttgtttattttggttttttaaagtgttgggattataggtgtgagttattgtgtttggttaataaattgattttttaaaaagtaatttgggttgggtgtagtggtttatgtttgtaattttagttttttgggaggttgaggtgggtggattatttgagattagaagtttgagattaattagtgtgattaatatggagaaagtttatttttattaaaaatataaaattagttgggtgtggtggtatttgtttgtaatgttagttattttggaggttgaggtaggagaattgtttgaatttggaaagaggaggttgtggtgagttgagattgtgttattgtattttagtttgggtaataagaatgaaattttgttttaataa

SEQ ID NO: 824 - DNA, 2823 bp, Artificial Sequence
  chemically treated genomic DNA (Homo sapiens)
ttattgagatggagttttgtttttgttgtttaggttggagtgtaatggtgtgattttggtttattgtaattttttttttttgggtttaagtgatttttttgttttagtttttggagtagttggtattataggtgagtgttgttatatttggttaattttgtatttttagtagagatgggttttttttatgttagttatgttggttggttttgaatttttgattttaggtgatttatttgttttggttttttaaagagttgggattgtaggtgtgagttattgtgtttggtttaggttgttttttaaaaaattaatttattggttgggtgtggtggtttatgtttgtgattttaatattttgggagattgaggtgggtggattatgaggttaggagattgagattattttgattaatatggtgaaattttgtttttattaaaaaaaaaaaaaaaaagaaaaaaggaaaaaaaattagttgggtgtggtggtatgtgtttgtaattttagttatttgggagattgaggtaggagaattgtttgagtttaggaggtggaggttgtagtgagtttaaatagtgttattgtattttagtttgggttatagagtgagattttgttttaaaataaataaataaataaaaaataatttttgtagtttttttttttaattgaaaatttaatgtaagaatatggtaagtaatatatattggttttgaatagttttgaaagatatataatgaaaagaaaaatttttaattttttgtgttgagattttttgtgtagaaaaaatttgatgtttaattttttgttttatttatatttttatataaataggaatttatgtgttttttgtgttttttattgaatgtttaggtgattttttaggatatataaagattttatgttttttttatttttttaaagagttgggttgattttgaagatagaatttttttttatttgatagtttttgtgttttttttttttttgaatttttgtattttttgattttgtagttgggaaggaattattttagttttttgtttaaatagaattttatagggttttattttgattagaggaaaaatgtatagaagtatatgtatatggtttttgaaaaatgttgggaagtttgttgggtttttagtgattttgttgatttatgagaatttagatgttagagtaaaggattgagggttaagggttgggttaagattgaaagatttttgttttggtttttttggtatgtggttttggtggaggaagtattagggatatagtggttggggtgggtatttggtggtagttgtgtggatgagggtgtagggtgtgttgaggttattttgttgggtttgtagtttgtagagatttttgggttgttaagtatttatgtgtttatatgtgtattttttttatttttagaggtgtgagttattttgtttattttgtaaatgggaaattgaggtttagagaggtgaagtgaattttttgagattgagattatagagggattggagtaggggaggattggaattttgggttttttttattggggttatattagttatgttatggggttagggttagtaggagaattttattatttggagaggggttaatggtagaattatggttgtattagtgggtttgtgtgaggggtttgtattttgggtatttttttttttagttttgttgttggaggaatgggaagggaggggaagattgatggttatttttttgtttaaggtttttagtatgagtgggattgttatggagttggtgaagggagttgtgtggggtagggattaggagggagtaagttagagggataagttgtgatattattaaaaaggatggagtgtaaggtgttgagttttttaggtgggggtagtaaggaagatagtgggttttttttaaatttggttaagtgttgaggaatttaaaattatttgttttggggtgtatgattttgggtagtgtgggatgtttgtggtgaggtggaagggatttttttagtgagagggaatggggtaattgttagatggatattggatttgtagaaggagggggtaggatatatgtgggtttaggatgtgttggataggttagtaaagtgaggattttaggttgttttgagttatttttttttttgtttgagttttgagttgtaagggatttagggtattaggtttttgggggttgtttttttattgtttgagtttagttttggttatttgtttggtttgttttttaaaatatgtatgaggtttttgtgggtgtagttttgtggttttttttggagtggggttgggggatttagggtgtgaggggagttgaggggggaggaagtgatgtgagttttttggttggggtttttttgatttttagtagtgtatttaagaaaaggtggaaattggatttgttttggtggtgttttagttttgtttgttttgatggttggattttgtggtttagtggttagttttttgttgtgtggtgtttggtttttgatagtaggtgaatgggttagggtggggtgtttggagtgtggggggtggggtgtgtgttataaaggggagtagtaggttgtgggggttatttgtagtttgtaaggtttgtgttttttgttttgtggttttgggtatatttggtttgggttgtttagtattgtatgggtttgaggattaggtagggtgtgggtgtagagatagttagggaggtttgaggtgatttagatgggtgggggaatgttagtaggatggggaggggttaatgtggagttattatttttttttggtttgttgggttttgtgatgtgttta

SEQ ID NO: 825 - DNA, 2344 bp, Artificial Sequence
  chemically treated genomic DNA (Homo sapiens)
taagaggagttaggatgaagggataggttttaaagattttgatgttaatatttttgaaagttttggaggagaaatggttgtttttggaaagaaaggattgaagagtatagagattatagttttttttatatataaattttatatatgagtttggtttgtgtttagtgatttttttattgttattgtgtagtttttttattgggtttataggaattgtgagttaggttggaggtgagattgtagttagatattaattaggtgtttttagttttgttgttttataggaagttgtttttttgagagttaggttatagtagatgttgattgttggtttttttattggtttggggataagatttttgagagttgtttaagagttgtttaagtttttttttagattttgaattttagtggaaaggttggtgttaagtaggttgaagattttataaggaagtttatttagtagtagaatgtggtttttttatttttagttttaagatttattttttatttttttattaattagtgattttatattttaattatttttgtttagatttttaaatattttatttttaaattttttatggaggtggatttagggtgtttttttttattaaattgtttttgttgtagtttttggtgtttgggtgtagtgatttgggttgtgaatttgtattggttttgttgtataatttggggagaagtggggttgagggtgtggagttgtttagagaggggtgttggggttggggttgtagttgtagtttagggatgggataggatgtttggggttttggttgttggtttagttttattttgtggttaaatggattgaggattgaggtgtgtagggggtgtttaggttttagattttaaagatgttgtggtgaggtttgggttttgttatagttggttttgattggttttgattagttttttgttttgttttaggatgttgggttttgtatatttattattttttggttgtgtggtgttttgggtttttttaatttttgtagttagggtaggttttagtgtgataaaagttattatagatgttttagggtgttttttagtgatagaatatggaatagaggttattagggtgaagaggttattagtttttggaatgttatatttttttttttgttttgtgtttgattgataatttttaggaatttgtttatgattttgattgggtagttttttaggttttgttttttgggtattgagtgatagaagaagtgattttatagtgttgagtgtagttggatgaataggttttagatttggtttttggtagggtgggttttttttttgtgttgtgatttgatttgttttgggaaatgtttgttttaaagtggaattttttatttgtatgtagtgggttttttttgttttttttttttgaataattgtgtgtaaggaattttagatttattgtttagtggagttattttttggttttagagtaggagggtagttgaggttatataggttatattgtagtagtgggggatagggggtgggtgggtgggggggtggtgttgatgttttttagggattaggaatttgggatgaggttgttgtttgtaaggttaagttttttttttattataagtgttggatgggttttttttgtgtgttatgtaaataaagattatggtattgtagttaaaaaaaaagtttaataaatattaggttagttatgatatgtgagagatggagttattatttaaattatttttatttaaggttttttggtaggggttttttaagggtagtttgggagaaagggtggaggtagttaggtttgttattgattggttggggtggggatgaaattattggggatggaatttgtttttttggtagtgtgtggtggtttattgttgtaattttaatattttgggaggtttaggtgggaggattgtttgaggttagtagtttaagattagtttggatatagagtgaaattttgtttttatattataagggaggagattattttttatattgttttatgtttaatttttgtttttaaagaagaagtaaaaattaaaaggtagaaatgaaatttataggtagataatttggtttgtgttttgggttgggtagttaaaaattaatttttgatttaattgtgttatttatgattttagatattgtatggaaaagtattgtgaaaatttttgttttgttttgtttagttttggttattggtgtatgtagtttttagttatgtatttattgtttgttttattaattatgatttttttatgtggatttttagttgtaagtttttaaaagggataagaattgtttatttggggagtttggt

SEQ ID NO: 826 - DNA, 2344 bp, Artificial Sequence
  chemically treated genomic DNA (Homo sapiens)
attgagttttttgagtgagtaatttttgttttttttaagggtttataattaggagtttgtgtgagagggttgtgattgatggagtaaatagtgggtatgtgattgggggttgtatgtattggtaattagaattgaatagaataggatagggatttttatagtgtttttttatataatgtttggaattatagataatatagttaggttagaggttgatttttaattatttagtttagggtataagttgggttatttgtttgtggattttatttttgttttttagtttttattttttttttggaggtagaaattgggtataagataatatgaggggtggtttttttttttatagtatagagatggagttttattttatgtttaggttggttttgaattattggttttaagtgatttttttatttaggttttttaaagtattgggattatagtggtgagttattatgtattgttaagaggatagattttatttttagtgattttatttttattttaattagttagtagtaagtttagttatttttatttttttttttaaattgtttttgaaaaatttttattagaggattttggatgagaataatttgagtagtaattttgttttttatgtattgtagttggtttagtgtttattaaattttttttttaattgtaatattgtggtttttatttgtgtagtgtgtagaaagaatttatttagtgtttatagtggaagaaaggtttgattttgtaggtgatagttttattttaaatttttggtttttggaggatattagtattatttttttatttatttattttttgttttttgttgttatagtgtggtttgtgtggttttggttgtttttttgttttgaggttaagggatggttttattggatagtgagtttgggattttttgtatataattgtttaggaggaagaagtaaaaagggtttattgtgtataggtaggaaattttgttttaaggtaaatgttttttgggatgggttgggttataatgtagggaggaagtttgttttgttaggggttgggtttggaatttgtttatttggttgtatttagtattgtgagattgttttttttgttatttagtgtttaggaggtgggatttggagggttatttaattaaagttgtgggtgggtttttgagaattgttaattaggtgtgaggtagagaggagggtgtgatgttttaggagttagtggtttttttattttggtgatttttgttttgtattttgttattgagagatgttttgggatatttgtggtggtttttgttgtgttgggatttattttgattatgggagttgggaggatttgggatattgtatagttgggaaatggtgagtgtgtggggtttggtgttttgaggtagggtgaagggttggttggaattagttggaattggttgtggtgggatttgggttttgttgtagtgtttttggggtttgggatttgagtgttttttgtgtattttggtttttggtttgtttggttgtagggtggggttgggttggtagttgggattttgggtgttttgttttgtttttgagttgtgattgtggttttggttttggtgtttttttttgggtagttttgtgtttttagttttgtttttttttagattgtgtggtggaattagtataggtttgtagtttaagttattgtatttggatgttgagggttgtagtagaaatggtttaataggagaggatattttagatttgtttttgtgagaggtttgaggatggggtgtttaggggtttggatgggggtggttgggatgtggggttgttggttggtggagaagtgaggggtgaattttgggattggaggtgaagaaattgtattttgttgttgagtgggtttttttgtggggtttttagtttgtttggtgttagtttttttgttggaatttaagatttgagaaagaatttagatgatttttgagtaatttttagagattttatttttaggttaatggggaagttggtggttagtgtttgttgtgatttgatttttagggaggtggttttttgtgaagtagtggggttgagggtatttggttaatatttaattgtaattttgtttttagtttggtttgtagtttttgtgagtttggtgaggaggttgtatggtgatggtgggagggttattaggtataaattagatttgtgtgtggggtttgtgtgtgggaggagttgtggtttttgtgttttttagttttttttttttaagggtgattattttttttttgaggtttttaaagatattggtattagggtttttgagatttgtttttttattttaattttttttg

SEQ ID NO: 827 - DNA, 2246 bp, Artificial Sequence
  chemically treated genomic DNA (Homo sapiens)
tgtgtgtgtgtatatttatatatatatatatatagttgttagttgtgtatatttgtagtttaagttggatatatgtgtaaattgtgtttttgtgtgtttattttttttgagttttggttgtgtaatagtgggagggggttggggggggttattgggtagtttattttaaaataaaagaaaaattgtttttatattttttttattttgggagtaggattttttgagaaggggggtggggtgttgtgtgagtgaattaaattgaattaatgtaagtttttatttatttaaaagtttttttggatttggattttgggggtgggggtgtggattgtggaaaagggttggggttgatatgggagttggggggatagtaagaattgttttgtttttttggaaaagttgtttggtagtttttatttttgttttatggttgtgggtggtgaggggaggggagtagatgttggagtttaatttttaaaaagtgtttttatataaattttggtattatagattttgggagggtgaggatgataaaataaatgatattaagataatagaattaagagtatgtgagggggtgagaagtgtttgagattttgtttgagttttatttggaaaaggatttttatttaaatttttgttttttttttttattttattttgattaatttttggggttaaatatgattttattttttaaattgggtttatggtaagtgagagggtaaagggattggggtgttttatgtgggagagggatttggatttgttagtttaggagtaggtgtggttaaatttttgtagatatttgggtgggtgattttaggaggtgtttttgataattatagtaatttggaagttatattttgttttttgtgttttttggtttagggtaggatttggaaatgtttgttagattgggaaggatgtagttgttttgttagttgtttgatttttaattggtgaggataagaggagttgtggggtttttttgtggtttggggataaggttagattatggtttttgtggatattttttattttttaggttgtggttaattttgttaatttgatgatttggtttttagggttgggtgtgttatgtggttggttttttttttttttttagggtttttttggaggtggttagggtgggttggggtttggttttggttaggttttgtgggtgagtttagttgtatttattttattttgtttttaggtttggttttggtggttttatttgggtgtatggtgaggttgtgatgttttagtgttgttttttttggggttttttttttggggggtatatgggggtttttgtttttgttttgaaggttttgggtggggtgatggtattaataatttaatagtgtttagagtttgtgagtgagaatagaaagagattttttttagttttatattttaaaaaataataataataaaatgtgttttggtttgtagttttgtaaattgtgggttttatggtgggtggatgtgaggttgagtggatggagattgggggtggggtgtggatttgtatttttttgttttggttgggtaggttgtatttggttgtttatttttaatattttatttttatgtggtttaaagtttagtagggttttttttttttgttattttttttattgggaaaatttttttaggaaagtggtttaaaaaaaatatgtttatatgtatttttaataaatttttttaagatatttataaattggttatttttatttgtttggattttaaatttgaaagattaatttgtgttttttttttgagaattagtgatgtgaagtttagagagggtgagtattttgttttaggatatatagtgtgttagggataggtttggatttaaaatattgtggtgtgtttgtagtttagtgttgttggtggtttgggatttgaaattttgatttatgatttttatttttttggggttgattataaggaaggtagattttgttagtggtaaggtgggatggggaggattttttaggaaaagggagtttttttgtgagtggtgtaagggtttttggagttttagttgtagttgttattttgtgtgtggtaaggggttgtgtttggggagggggtattttttttttatttttagtaggaagtagttggtgtgggttggtgtgtgttttatggatttgaggagtatttttttattggttttgtgttgttttgatggtgggaagagggatgtgtgggtgggtggatgtagg

SEQ ID NO: 828 - DNA, 2246 bp, Artificial Sequence
  chemically treated genomic DNA (Homo sapiens)
tttgtgtttgtttgtttgtgtgtttttttttttgttgttggggtagtgtggggttaatgaggaagtgttttttgggtttgtggggtatgtgttggtttatgttagttattttttgttgggagtggggagggggtgttttttttttaggtatggttttttattgtatgtggggtggtggttgtagttgggattttgagagtttttgtgttgtttgtggaggggttttttttttttgaggggttttttttgttttgttttgttattggtggggtttgttttttttgtaattaattttaggaaggtgagggttgtgggttgggattttgagttttggattgttggtggtgttgggttgtaggtatgttgtggtgttttgggtttagatttgtttttgatgtgttgtgtgttttagggtaaagtgtttattttttttgggttttatattgttagtttttagaaagagagtgtgagttgattttttaaatttagagtttgggtgagtagggatggttagtttatgaatgttttaaagaagtttattaaaggtgtgtgtgggtatattttttttaagttatttttttggaaagatttttttggtgagagggatggtagaagagggaggttttattagattttggattatgtggaggtggggtgttgggggtgggtagttgggtgtagtttgtttggttagggtgaggaggtgtaagtttgtgttttgtttttggtttttatttgtttggttttgtgtttgtttattgtggagtttatagtttatagaattgtaagttagggtatattttattgttattattttttagggtatgggattggaagggatttttttttgtttttgtttatggattttgggtgttgttaaattgttggtgttattgttttatttaagatttttgggatgaaaataaaaatttttgtgtgttttttgaggaaaaggttttgagggaggtggtgttgaggtgttatggttttgttatgtgtttgggtgaagttgttggagttaggtttgggggtggagtggggtgggtgtagttggatttgtttgtgaagtttagttggagttaggttttgatttgttttggttgtttttagagaaattttgagaagggagaggaggttagttgtgtggtgtgtttagttttggaggttaggttattaaattgataaagttggttatagtttggggaatggggggtgtttatgggggttgtggtttggttttgtttttgggttatggagaggttttataattttttttgtttttgttggttggagattaaatggttgataaggtagttgtgttttttttagtttgataggtatttttaagttttattttgggttgaggagtgtggggggtggggtgtgatttttaggttgttgtgattgttaggggtgttttttggagttatttatttgagtatttgtggagatttggttatatttatttttgggttggtaagtttaagttttttttttatgtggagtgttttggtttttttatttttttgtttgttatagatttagtttaggaggtggggttgtgtttgattttaggagttaattggggtaaggtgaggggaggggataaagatttgagtgaaaatttttttttaagtgggatttaaataaggttttaaatattttttatttttttatgtgtttttgattttgttgttttagtgttgtttattttgttatttttatttttttagagtttgtaatattaggatttatatggagatattttttggaagttgaattttaatatttatttttttttttttgttgtttgtgattataaaataaaagtaaaaattattaagtgatttttttagggaaatgaagtgatttttattgtttttttaatttttatgttgattttaatttttttttatagtttatgtttttatttttaaagtttaagtttgaaagagtttttgggtgggtggagatttgtattgatttaatttagtttatttatatagtattttgtttttttttttagggggttttgtttttaggatggaggagatataaggatgattttttttttattttaaaataagttgtttagtggttttttttaatttttttttgttgttgtgtagttggggtttgggggagatgagtgtataaaaatgtggtttgtatgtgtgtttggtttgggttgtgggtgtgtgtaattggtgattgtgtgtgtgtgtgtgtgagtgtgtgtgtgtgtg

SEQ ID NO: 829 - DNA, 2357 bp, Artificial Sequence
  chemically treated genomic DNA (Homo sapiens)
tttgtagtttttgggagtgggaatgttggggataagagttgaagggatgaaggatattggagatggttagggggaaatttggtgtgatttttttttagggttgtgtgagggtttttaaatttttatttttgtttagggttggtagtgaggttttattatagggataagtttggtagattttttttttttttaggtttttagtaaaatgttgggttttttgttagtggaaaatggaagaaaagtttggagtgtttttggagttgtttgtttgggaagaaatgaattttgattttagttttggtttgtgtattggaggttttagggttgtgagggttgtttgggtagagtttaggttaagaaggagtttggttgaggataggagtttggggtttgtgtgggagatgggatttttttttaggatgtttgggttggtttgttgggaggtggtggggttttttttttagggttttgtatttgggttttatattgggtgaaatttttgggttggggtttagtatgtgagattgttgttttatgtgggttatatagattatttttttgtgggttgtagtttttggttattggttttttttttggtgttggggttgtttggagttgttgggagttgagtggtttttggggaggtggtgttgtggtgtttagggtgtggggtttgtttttgtgtgtttgagggtgggggttgtataggagttttttttggggttggtttttgaggtgttgtattttttattagttttttgtgattgaaattgaaatttttatttgtgtaatttttttagatgggtttgaggttggggtgtggttgggatttgggtggggaggggtaggggtggagtgaaggtggggtttgggggggtgtgtgtggatggggagagtggaattgtgggtgtggatttttaagtatagatgttagagaatgtttgttgttttggtttgttggtttaggggtatgatttttgttttgggtgtgagaggttttgggtttaaattttggatgagtttgtttttttttttttttttgaatattattatttttttgtggtgaagattgaggagttttatggagttttggttgtagggaatttggtttttttgtggtagttgtaggtgttggggttgatttgattttttgtttttgtttggtttgtggttttttgttttgtttggttataggaaggatttgtttgtgttttttgattggagttttttatttgggagttttgagtgtgtttaaggtttggtgttgaggtagtggattttagatttgggatttgaaaggagggtaaatatttttattgttgtgtttgtttttgtggatgtggttttagattttgggtggttatggaatttggtttgggtgtgtagtttttttttgagtgggttggttttaagtttaaatttttgatgagtttagggttttgaattttttttttttttttttttgttttttttttttttttttttttttttttttttttttttttttttttttttttttttttttttttttttttttttttttttttttttttttttttttttttttttttttttttttttttttttttttttttttttttttttttttttttttttattttttttttttttttttttttgttttttgttttttttgatagtgtttttttttgttgtttaggttggagtgttggagtgtagtggtgtgattttggtttattgtaattttaattttttaaatttaagggatttttttatttttattttttaagtagttgggattataggtgtttattattatgttaggttaagtgtgtgtgtgtgtgtgtgtgtgtgtgtgtgtgtgtgtgtgtgtttgtgtgtgtaaaattgaggttttgttgtgttttggaggttggtttttaatttgtatttaagtaatttttttattttggtttttttttataaagtgttgtaattataggttagaattattatgtttagttggttttttttttttttaggttttgaggttgtagtggtgtgtttttttggtatatggtggggaagaggtgtggttttgggagtttgtgatgtttttggggagtttaagtttggtttttagttttttgtttgaggatggaggaggatttggggggttttttttagttggtggttttagttttttaggggtggtggagatagtaggaagttttaaaatttgagttgggttttttgtttggagttgtagggtgtggtaatgttgaagtttgttgtgtttttgttttttatgggaattagaatttggtttaggataagtattgggaaagggggatagtttgtgattgaggaaattaggattgatttagaatagtgta

SEQ ID NO: 830 - DNA, 2357 bp, Artificial Sequence
  chemically treated genomic DNA (Homo sapiens)
tgtgttgttttggattagttttagtttttttggttataaattgttttttttttttgatgtttgttttggattggattttaatttttatagggagtaggggtatggtgaattttaatattgttatattttgtgattttaagtaggaaatttagtttgggttttggggttttttgttgtttttgttgtttttggagaattgagattattagttaggggaagttttttaggtttttttttgtttttgggtaaagggttaggagttgggtttggattttttagaggtgttgtaggtttttggaattgtattttttttttgttatgtattggagggatgtgttgttgtgattttaggatttggaaggaaaaggaattagttgagtatggtggttttggtttgtaattgtagtattttgtgaggggaggttgaggtaggaagattgtttgagtgtaagttggagattagtttttagaatatagtgagattttggttttatatatataaatatatatatatatatatatatatatatatatatatatatatatttagtttggtgtggtggtgagtatttgtagttttagttatttgggaggtggaggtgggaggattttttgagtttgggaggttgaggttgtagtgagttgagattgtattattgtattttagtattttagtttgggtaatagaaggagatattgttaaaaaaaataaaaaataaaaaaagaagaaaaaggaaaataaaagagaaaaagaaagaaagaaagaaagagagagagagagagagaaagaaagaaagaaagaaagaaagaaagaaagaaagaaagaaagaaagagagaaaaagaaagaaagagagaaaaagaaagaaagaaagaaaagaaaagaaagagaaatgaaggaaaaaaggaaggaagtttgaaattttgggtttgttggaaatttaaatttagaattgatttatttaaaggaaaattatatgtttagattaagttttatggttatttgggatttagggttatgtttgtagaggtagatgtggtggtggaggtgtttgttttttttttgggttttggatttggggtttattgttttagtgttaggttttaggtgtatttagaatttttaggtggaaggttttagttaggaggtgtaggtgagttttttttgtagttgggtaaggtgaggggttgtaagttggatggaagtgggaagttggattggttttggtgtttgtagttgttatggagagattaagttttttgtggttgagattttgtgaagttttttaatttttattgtgagaaaatgatggtgtttagaaaaaaaaaaaaaagtgggtttgtttgggatttgaatttgggattttttgtatttaaagtgagaattatatttttagattaatgagttaggatgataaatgttttttgatgtttgtatttggaggtttatatttgtggttttattttttttgtttatgtgtatttttttagattttgtttttattttatttttatttttttttgtttgggttttggttatattttaattttaagtttatttgggagggttgtgtaggtggaggttttggttttgattataggaagttggtaggaggtgtagtgttttggggattagttttgggaagagtttttgtatgatttttgtttttaggtgtatagaggtggattttgtattttgggtattgtggtgttgtttttttgagggttatttggtttttagtggttttaggtggttttagtattgagaggagggttggtgattaggggttgtggtttgtggggaggtggtttgtgtggtttgtgtgaggtagtggttttgtgtgttgagttttagtttagaaattttatttgatgtgaaatttgagtgtaggattttgaggaggagattttgttgttttttagtaggttagtttgggtattttaggaagggattttgttttttatatagattttgggtttttgtttttagttgagtttttttttggtttgagttttgtttaggtgatttttgtagttttgggatttttgatatatgggttggagttggggttagagtttatttttttttaaatgggtggttttagaaatgttttaaattttttttttgttttttattggtaagggatttagtattttattgggagtttaaggaggagaaaggtttattgggtttgtttttgtggtgaggttttgttgttggttttaaatagggatgagggtttgaaaatttttatatagttttaagagagagttatgttgagtttttttttggttatttttagtgttttttgtttttttagtttttgtttttgatgtttttgtttttgggagttgtagg

SEQ ID NO: 831 - DNA, 2290 bp, Artificial Sequence
  chemically treated genomic DNA (Homo sapiens)
taataaggtttttaaagtttttatatttaatgtgtggttttggaattagaagtattgtaattatttggaagtttgtttgttataaatatagatatttagattttgttttagatatattgaaatagaatttgtattttaataaaagatttagaggattgtttttatattgtgtgtgtgtgtgtgtgtgtgtatttaaaaagatataggtgttataattttttattgtttggttaattttaaaatttaatattgtataatggatattttttatgttaatatagatttatgttattatttattataaataaatagtaagttattgtatttattgttattgattggtatttatattaatttaatattttgttattgtaagaaatattttgatttagaaatgttgatgtaaagatttttgagtaggatatttaggagatattgattttgttatatttttttttttgttatattttgttgttttaatagattatgtgggtatattatttttattgattttttttttttttgtaaatgtaaattttaattgaattataaggttagtttatagtgtatttgtgggtagatttttttaaaatgtatggtattttaaattttgttttatgagaggtttaggaaaatgtttattaagtttttgtgattttaatattgtgttaggttatggtaaagtgaggtgtttttgatgtttgggttgttatagtgtgttttttagttattttggtaatatttgtgatttgagggttattttatttgtgttagtaatttgtgtgggttgggaggtgttaatgagagtagggtttgaaattagtgtttggtgtttgatggttgtttagtgatggttgttgatgttaatttttggttggatggatttatatttgttttttggttattgagagggtagttatgaatatttaaaagggtttttttattataaatgtttatagaggtttttttgttatgagtatttaaaggggtttttttgttttttgggatatggatagtttgggtagagatatgtagttgtgggtgattttggttgaggtgaagtttttggatatgatggttgggagggtgtattgttttttgattattgtgtataatatttgttgttggaattagaaaatttgatttaaggagtttgttaagttataggtgatatattaaggggtgttgggagtgggattttgtgagagtgtttttttatattgtgtttttttttgttttagggagtagttatttggtttttgttgggatggagggaggattgggttttttgggaaatagtgataggtttttgtgtgtgtgttttttttgtttttttttgttttttgttttgtttaggattaggagatggggagggtagggtggagaaaagttgatttagagtttttttatttttttaatttgggtttagaaatttgttaataattttaaaatttgtgtaatttggttttatgattttgttgttgttttaagaattatgagaataaaattttttattaattgttttttgaattataaagtgtttgataattttaggaattgtaggattagtggaaaggtttattattttatattttaataaatatttgttaagtatttattatataatgggtaatagatatgaggaatatggaatggatatagttttgtttttatagaatttagaaattaatgagggggttttagtatagatttaattattaagaaagttaatgttttgagagggtgtttttattttttaatttaaagtgggtagaattttttttgtattttattgtgttattttatattatgtgtgtgaatggatggttattagtttagtatgattatatttttttaggtaaatttttgatataggaaatgtgataagaatttttgaaatgtaagtaataaataattgaaaattttaagagatatttttaataaaaagtagtgttgaatatagttggattatatgtgtagaaaaaaaagatgtttgtaattttagattaaatttatatatatttttttgtatatatgtagaaaaatttatgttaatgattagaagagtaatgagaaaaaggatttttatgttttaatttttgttttgttaaaaaaattgatgtattatttatttattaaagtgtatagattttaaaagtaaagtttgatgaatttataaaaaaataaatatgtgtgtgtgtagatagatagttagatagataatttttattagttattatttggattaaataatagaatatgtttattattttagaagatttttagtgtt

SEQ ID NO: 832 - DNA, 2290 bp, Artificial Sequence
  chemically treated genomic DNA (Homo sapiens)
agtattggggattttttggggtagtgaatatattttattatttgatttaggtggtagttaatggagattatttatttagttatttatttatatatatatatatttatttttttgtaaatttattaaattttatttttgagatttgtgtattttagtaagtaaataatatattgatttttttaatagagtaaaaattagaatatggaagtttttttttttattgtttttttaattattaatataggtttttttatatatatataaagaaatatatgtaaatttaatttaaaattatggatattttttttttttgtatatatagtttagttgtatttaatattattttttattaggaatattttttgaagtttttagttatttattgtttatattttaaaaatttttattgtattttttatattaaaaatttgtttgagaaaatgtgattatattgaattaataattatttatttatatatatgatgtaaaataatatagtgagatatagaggaaattttgtttattttaaattagaagatagaaatatttttttagaatattaatttttttgatggttagatttgtattaaaatttttttattagtttttaagttttatgagggtagggttgtgtttattttgtattttttatgtttattatttgttatatagtaggtgtttaataaatgtttgttaaaatatgaaataatgaatttttttattaattttatagtttttggagttattaggtattttatgatttaaagggtagttaatagagaattttgtttttataatttttaaggtaatagtaaaattataaaattaagttgtatagattttgggattgttaataagtttttaaatttaggttgaagaaatggggaggttttaggttagtttttttttattttgttttttttattttttaattttaaataaaatagaaaataaagagaaataaaaagagtatatatatagaaatttgttattgttttttgggaagtttaattttttttttattttggtaggagttagatgattattttttggggtaaagagagatgtagtgtgaggaggtgtttttataaggttttgtttttagtattttttagtgtgttatttgtggtttgatgggttttttaaattggattttttggttttagtggtaaatattatgtatagtaattgggaggtggtatatttttttggttattgtgtttaggaattttattttagttgggattatttgtagttgtatgtttttatttgagttatttatattttgggggatgagggaatttttttggatgtttatggtgagggaatttttgtggatgtttatggtgagggaatttttttgggtgtttatggttgtttttttggtagttagaaaatagatgtggatttgtttggttaaggattagtgttgatgattgttgttaggtaattattagatgttaagtgttagttttaagttttgtttttattggtgttttttaatttgtgtgagttgttaatgtgaatagaataatttttaggttataggtgttattagagtaattgaaaaatatgttgtggtagtttaaatgttagaggtattttattttgttatggtttggtatggtattaaaattatagaggtttagtgggtatttttttggattttttgtaagataaagtttaaagtattatgtattttaaagaaatttgtttatagatgtattgtaaattggttttataatttaattaaaatttatatttataaagaaaaaaaagattagtgaaagtgatgtgtttatgtggtttattaaggtagtaagatataatagaaagggagatataataaagttagtgttttttagatgttttgtttagaggtttttatgttagtgtttttgaattagaatgttttttataatagtaaaatattggattaatatgaatattaattagtagtgatggatataataatttattgtttatttatgatgaataataatgtagatttgtgttgatataagagatatttattatatagtattaaattttaaaattgattaaataataagaaattgtgatatttgtatttttttaaatgtatatatatatatatatatataatgtaaaagtaattttttgggttttttgttaaaatgtagattttgttttagtatgtttgaagtaaggtttaagtatttgtatttatgataagtaagtttttaggtgattataatgtttttggttttggggttatatattgaatatagaggttttaggaattttgtta

SEQ ID NO: 833 - DNA, 2375 bp, Artificial Sequence
  chemically treated genomic DNA (Homo sapiens)
agtttttgtggttgttttttaggagagagggagggaggaaaagggggaaaaaagtgttttgtgttgaaggtgaggtttgtattttttgtttttgtggttggtgtaggattttatttgagtggagtgtttatggggagtgggttgtggggtggtggtggtgaggaggaggtgagaaggagttggaggaggaggaggaggaggtgagggtgagttagtttagtggggttttggttgttttgtgggttaaagttgagtttttttgtttgtgggtgagtgtgttagttgttttttttagaatagttgttgttataaagaagaatggggggtgttgaggtttttatgattttttaaagtggtgtggtttttgttgagtgtgttgtttgggttgtgatttgtgtttttgtgtgtttttgtgtgtttttgagtgtttttgtgtgttttggtttgtgttttgttggtatggatgtttatatttgttggaaagtgtgtagtgtgttttgtttgggtgttttgttgttgtttttgttgttgttgttgttgttgtgggtgttgtttttgagttgtgtaggtaagggtgttttggggtgtggggttgtgggatggggtgtgtgtagtttgggtgttgttgttatttttgggtgtttttgtttgtagaattttttttttttggtttgtggaatgtatgggttaagattatgaatgttatttgttgggggtttttttgagatgatgatatgtagatataatgtttgtgggtgtgttgttgttttttttttagatgggtgggttgggtggggttgttgtgtgagttgaggaaggattgagggttggattagtaggaggggttgtttatgaggtgggtaaatttttgttttaaaaattttttttttttgttttatattataggtgtttagtttgggtttttatagttttatagtagaattttttttgttttaaattgggtagggttgttttttagagttatagttttttaaattttgggatttttggggatggggggaattttagaagtttgggtttttagtattgaattttttttaggtattgttattttaggttgagttggtgttttgttttttttagggatagtgttttttgtagttttggttatttaagtgtttgggggtattggggatttttgtagggtggtagatagttttgtttttaattttatttttaaattttttgatttttggaaggtagttttttttggatttgttgttgagagatgggatgtgtggagtaaagttagagatgggtttgtaggtggggttgtgagtggttgggatgatatgtagatgtgggattttttttgttaagggttagtttttagaaggaggtttgttttttggggagggtgttttaaggtggggattgtttgtgtttttgtttgggtttttgagggtttaattttttttggtgtagttttttgatgggggagtttttttaggtattgtttttggtagttagtggtggggtgggtttttatagatttttgaatattagagtttttagttttggaaggttttttgaatttttattgataggtggggagatggaggtttagagttgtgtgttgttaggttaggagaagtggtgggtagagtgatgggatggtgggtttagtgaatgtttggattagtttgttgtttgttagtaagaatgtttttttttgttttatgattggaagataagtgggaagaattattgtttgtgttttgtttgttaattaaaatattttttttttttttttttggtatgattagtgtttgttgggttaattggatgagttggagtttgggtgtgggggttgttttggggttttgggggaggagttaggagtttggtttggtttttaggatttgggattttatttttgggttgttattaatttttttttgattttgggttaattgggtttgtgtttttttaggggttagttgaaggtgggggataatagaggtttttagaaaagtggagaggagaaggaaggtgtggttagggattgtgttattgttgggggattaggttttgttttagtgtttttggggatttttttttagaaatttaggagggagttttttaggggaattgttattttagatagttggggtagggtattgtttggggattatgtattggattgggtttggggttttatttttttttttgtttatttttttatttttatattgtttttttttttttttggttgtttttgttaattgaagtgtggtttgttggaagtgggagtgaggatggtttagagtagtaggttatggagttggatattttgtttttgttagaatagatttttagaagtatgtggagagattattttttttagtgagttt

SEQ ID NO: 834 - DNA, 2375 bp, Artificial Sequence
  chemically treated genomic DNA (Homo sapiens)
aaatttattaagaaaagtggtttttttatatgtttttaaaagtttgttttgataaaagtaaaatgtttaattttatagtttgttgttttgggttatttttatttttatttttaatgagttgtattttgattagtgagggtaattagagagggaaaaagatagtgtggaggtggggagatgggtagggagggaaatggaattttaagtttagtttggtgtatggtttttaggtagtgttttgttttagttgtttagggtgatgatttttttgaaggatttttttttgagtttttggggaaaagtttttagaggtgttgagatagggtttagttttttggtaatggtatagtttttgattatatttttttttttttttttatttttttggggatttttgttgttttttatttttagttaatttttggagaaatataagtttagttagtttagggttaggagagagttggtggtggtttagggatgagattttaggttttgggagttaggttaggtttttggttttttttttagagttttagggtagtttttatatttagattttagtttatttagttagtttaataagtattgattgtgttagggaaaaaggaaaagagtgttttaattgataagtggaatatggataatgattttttttatttgttttttaattgtgaagtagagagaagtatttttgttggtaggtggtgggttggtttagatgtttgttgagtttattgttttattgttttgtttgttattttttttgatttggtagtatatagttttgagtttttatttttttgtttgttaataaggatttgggggattttttagggttgggggttttgatgtttgagagtttgtgaaaatttattttgttattaattattaagagtgatgtttagaaaaatttttttgttaggaagttgtgttagggagagttgaatttttgagaatttaggtagggatgtagatagtttttgttttgaagtgttttttttgggaagtaagtttttttttaagggttgatttttggtagaaggaattttatatttgtatattattttaattatttatagttttgtttgtaagtttatttttggttttgttttatgtattttattttttagtagtgaatttaggaaaagttgttttttagggattaagaagtttgggggtgggattaggagtagggttgtttattattttgtaggggtttttagtgtttttgaatatttaggtgattaaggttgtaggaaatgttgtttttggggaaagtagggtgttagtttagtttagagtgatagtgtttgggggaagtttagtgttgggggtttaggtttttgggattttttttatttttaggagttttgggatttgaagggttgtaattttagggggtggttttgtttggtttggagtagaggaagttttgttgtagggttgtgagggtttaagttgggtgtttgtgatgtgggatagagaaggaaggtttttgggataaaagtttgtttgttttgtggataattttttttgttgatttagtttttggtttttttttggtttgtgtgatagttttatttgatttgtttgtttggggagggggtggtggtgtgtttgtgggtattgtgtttgtgtgttgttattttgggggggtttttagtaaatggtatttgtggttttggtttgtgtattttataggttaaggaagaaaagttttgtgggtgaaggtgtttggggatgatagtggtgtttgggttgtgtgtgttttattttgtagttttgtgttttggggtgtttttatttgtgtggtttggaggtggtgtttatagtagtagtagtagtagtgggggtagtagtggggtgtttgggtggagtgtgttgtgtgttttttagtgggtatggatgtttatgttggtggggtgtgggttggggtgtataggggtgtttggaggtgtgtggggatgtataggggtgtgggttatggtttgggtagtgtatttagtagggattgtattattttaggaggttatggggattttggtattttttgtttttttttgtggtggtggttgttttggaaggggtggttggtgtgtttgtttatgggtgggagggtttgattttggtttgtggggtggttgggattttgttgggttagtttgtttttgttttttttttttttttttttaatttttttttgttttttttttgttgttgttgttttgtgatttgttttttgtgggtgttttgtttgagtgaggttttgtgttagttgtggggatggagagtgtggattttgtttttggtgtggagtattttttttttttttttttttttttttttttttttggaaggtagttgtggaggtt

SEQ ID NO: 835 - DNA, 2227 bp, Artificial Sequence
  chemically treated genomic DNA (Homo sapiens)
ttgttttttgttgtggttttgttttttgttgtggttgggattttgtgggaagagttgtgggtatggtggtggtttggttttttggttgtgtgtggagtgggagggttttttttatataagtgtttttttgttgagaggttggagttgtggtattgtaggtttgagttattttttttttgttgttttttttttttttttagggtttttgtgtttgtttgttttttgatgttgtttaggttagaaagtttggagtgtgtttttgttgaggagtggttggggagtggggatatggagtagttggagtaggtgggtttttgatgggggtggttttgggggttgtgtggtgttgtttggtgggtgtgaggtttggtggggtttgggagtttggggggtgaggaggtggtgtagtgggatttgggtgtgggtgtttaagggtggtgtagtgggtgttggagtttttgaggtgagggggtaatgtattagggattttgggggtttttttggtttggggtaggggtgggtggtggtatatggggttttaggtttttgatgttgagggagatttattagggttttgagttttttggaggtggtgtagtggggttttgggataaggggtttttttatttgggttttgagttttttggggtagagaatgtagtttagtaaggtttatattggtgtaaattttgtttttggaggtagattattggggttttgggggttttttgagtgggtgtgggtgtttgttttgtattgttgggatgaagaagtagtgtgtttgggttttggggagaggggtttgtttattggtgtttttgggtgagagagtgatgtatttgttttgttggggttggggttgttttggggggttgttgggggttgagggtgtgtagtggtgattagtgtttggttggggtttttgttttgtttggagtggggtggtaatttggtatggtttttagttttttgggggtgatggggtgagttagttggtttttgggtagttttttggggtgggtgtggttttgtaggtgttgggtttgttgagggtgggagagggttttggtgttattgtgtaggttgggtagtattttgaaatgtttttgtttaggtttttttttttttggatgagatttatttaatgtttagttggaggattgattggtgttgttgtttagttgaagaagtagtgtgtttgttttgtagtttttttttttttgttttgggatttttgtgggggtgtgttggttttgttggagttttgggagttagagtggtagtattttaggtgggtgtttggtttgtaggttttttaggaggttggtgtttgtaggttgagtgtggatatagtttttgagtaattggaatttgttgagggtggggaagattgattttggtttgtttttttaggtggtggtttgttttgtttattttgtatgattagatttgttttgaagttttgtttgagtgaatgttaggtagagttggatagtgtagggaagtgtgttttgtttggtttttttttgttttttgaaaagtatttgtagagagggataatgttaaatttagtttttagaaaataatggaatttgaaattttaaagttagaattttgtaaaaatgttttttgtgatttgtaaggatggttaattgagtttttttagagaattttgtttaatagttttattgtattgtaaaagtgtatttagttttggatattatagaggttttggtaattagtgtaggtgtaggtgggatttaaataaaatgatttgtatgtatgtgtattggttaaaaaaaaaaatagtgtataggtgagaaagtttatgtgtttgtttgatattttttttggttagttattttattatagaggtttgtatatgaaagttaatgtggtaggtagtgaagtttgtatttagagttgttttgtaaatatgtaatttggggttaatagataaatttgagtatattaaagtaaataattttgtttgttttagtttttttttttgtgttagtttttttttttttttgttttttggtttgttttttttgaaatagggatttattttgttttttaggttaggttgtagtattgttattatggtttattgtagttttgatttttaaagtttaagtagtttttttagtttagttttttatttttatttttagtagaggagttggaattatatgtatgtgttattatgttttattaattttattta

SEQ ID NO: 836 - DNA, 2227 bp, Artificial Sequence
  chemically treated genomic DNA (Homo sapiens)
taaataaaattagtgaggtgtggtggtatatgtatgtagttttagtttttttattgggggtggggatgggaagttgaattgggagggttgtttgagttttggaggttgaggttgtagtgagttatggtagtgatgttataatttagtttggaaggtggaataagtttttgttttaaaagaaataaattaaaaaataagaaaaaaaaaaaattgatatgaagaaaaagattaaggtaggtaaaattatttgttttggtatatttaaatttgtttgttaattttagattatatatttatagaatagttttgagtatggattttattgtttgttatattaatttttatatataggtttttgtgatagagtaattaattaaaagaaatgttaggtaaatatataggtttttttatttatatgttgtttttttttttaattaatatatatatatataagttattttatttaaattttatttatgtttatgttagttattaaaatttttgtaatatttaaggttaaatatatttttataatataatgaaattgttaagtagaattttttaaaaaagtttgattaattatttttataggttatagaaaatgtttttgtagagttttagttttgggattttaaattttattgttttttggaggttgaatttgatgttatttttttttataaatgttttttaaaggatagaaagaagttagatagaatatgtttttttgtattatttgattttgtttaatatttatttaggtaagattttagaatagatttaattatgtaggatgagtaaagtagattattatttaggaaagtaagttaaaattagttttttttatttttaatagattttagttgtttaggagttgtatttatgtttaatttgtggatattggttttttaaagaatttgtagattaaatgtttatttaaggtgttgttattttagtttttggagttttagtgagattagtgtgtttttatagggattttggggtagagaaaagaaaattgtagaataaatgtattgtttttttaattaggtaataatattgattaattttttaattaagtattgagtaaattttatttagagagaaggagatttgaataaaaatgttttaggatgttgtttagtttgtgtggtagtattaaagtttttttttgtttttagtggatttagtgtttgtggagttgtgtttattttgagagattgtttgggggttagttaatttgttttgttgtttttaaaagattggagattatgttaagttattgttttgttttgggtaaagtagaaattttggttagatgttggttgttgttatatatttttagtttttaataattttttaaggtggttttggttttagtggaatggatatattgtttttttatttggagatattgatgaatagatttttttttttagaatttggatatattgtttttttattttagtaatgtgaaatggatgtttatgtttgtttaaagaatttttaagattttgatgatttgtttttagagataaggtttatattggtgtaaattttgttaaattgtattttttgttttaaagagtttgggatttgggtaaaaagattttttgttttggaattttgttatattatttttaagaagtttaagattttgataaattttttttgatgttaaagatttaggattttgtgtgttgttatttatttttattttaagttggaagagtttttaggatttttaatatattgtttttttattttgggagttttggtatttgttatattgtttttgggtgtttgtgtttggattttattgtattgtttttttgttttttggatttttaaattttgttaagttttgtgtttattaggtagtgttgtgtagtttttagagttgtttttgttaggagtttgtttgttttggttgttttgtgtttttgttttttgattgttttttagtggagatgtgttttgggttttttaatttgagtagtgttggagggtgagtagatatgggagttttgaggaagagaaggagatagtagagaaggggtggtttaggtttgtggtgttgtagttttagttttttggtaaggaagtgtttgtgtgaggagagtttttttgttttgtgtgtagttgggagattgagttattgttgtgtttgtagttttttttgtgagattttagttatggtaaggggtggggttatggtggggggtgg

SEQ ID NO: 837 - DNA, 2299 bp, Artificial Sequence
  chemically treated genomic DNA (Homo sapiens)
gtgagttttggttgtgggttaagtttaaagagtgtgttttggttgtttttttaggttaattttatttgttttttattttagtaaattttttatttattttattttattttttaggttttttttgttgtgtttggttgtattgtgatttgggaagaagggagaagtgttattttttagtgtgtgggatttgtggggatttttgtttttttgttggttgataaagaattaatatttgttttgttgtgtttttggggttaaagaatgaaaattgttttttttttttttggtggatatggagtgtgtttgtggtgggttgattagtttgggagtgtagtttttgtgaaggggtggtggggagtggtggggtttgggtgtgtggagagtgtttaattaatagtgtatttggatgtgtttggttgtggttttgattttgtttttgattgtgtttgtggggttttagtttttgtatattattttttatagtgttttgtttttatgtatgttttagttgtttttatttgggaaatggtgagaggttgtttgaagtttttgttgtttatgaggtggaagttttatggttttgggttttggaggtttatttgttgggtggttatggtgtggttgtggtgggtgatgatttgtggggatagatgggtaggatgtgtggaatagtttgtagggtatttttggtggttgttggagaaagagtggtgtggtgtgggtttggggagtttggggttggtgggggtagggtaattgtgagggttagggtgggggtggttttgtttaggttgtgtagttgtttgttgttttgtttgtttttttgtttgtagttgttttttgttttgtgtgttggtttgggggttttggtttggagttttgttgagagagtgtgagttagatgtggggttggggtttttagtagttttgtttgggattttatattgttttttttttttttgtatgtatggttgtattgtggtttttgggtttggggtgggtgttaggtgagagggaagtaggttttgatagtgagataaatttgtgttttgtgttttgtaaaatgagaaatttgaagtgttgtgttaagttagttttttgaggttggttttgattttttatttgttttttgtaattggtaatgatgtttaaaaggtgtttttgaatgattttatttgatgttgaggtaattgggatgtttagttttattttatagatgaagtaattgagtttgtttagtaggtgagaagatttgtttgatgttatattatttgttagtatttggattattgtttgggtttagtgttgtagaattttattttggaatttttataatgttaatgagattattatttaggttataattgaattttaaggtttttttagaaattttttttttaggttggagtttatggtaggttttgattttaatagtttaaattttaagtttggggtgggttaagggttaagttaatgtaaaagaagagttgagtttgggatttggatttttagttttttattagttttttagttaggttttttttgatgtttttttggtggagtgtattttttatgttggattagattattttttatgttgtttatggtgtttttattttattattagtgaaaatttagatttttataatgtttataaggttatttttagaatggttttaattttttttttgattttaattttttttgttttttttttatttgttttttagtttgttaggttgtgttttttgtttttaatttagggttttgttttagggttttgtttgtaatgttgtttttttagatatttttattattttttgttattttttaggggttggatatgtggtttatgtttggaattttggtattttgggaggttgagttaggaggattagttgagtttaggaattttagattagttttagtaatatggtaagattttgtttttataaaaaaatttaaaaaaataaaaattaattaggtttggtggggtatatttgttttagtttttagggagattgaggtgggaggatggtttgagttggagaggttaaggttgtagtgagttgtggttgtgtaattgtattttagtttgggtgatagagtgagattttattttaaaaattaaaaaataaaaaaaatgtaaatgttattttttgaggttatttttgagtattatttaagatattttttttagaatgttttattatttttttttgttttattttttttttttgtatgtattattatttggtattttttatattttgtatatttatttgttttatttttattt

SEQ ID NO: 838 - DNA, 2299 bp, Artificial Sequence
  chemically treated genomic DNA (Homo sapiens)
gagtgggggtggaataaataaatatataaaatatagagaatgttagatggtgatatatataaaagaaaaaaataaggtaggggaaggtaatagagtattttagagaggatattttaaatgatgtttagagatgattttagaaaatgatatttgtattttttttattttttagtttttgagatagggttttattttgttatttaggttggagtatagttgtatgattatagtttattgtagttttgatttttttggtttaagttatttttttattttagtttttttagaagttgggataggtgtgttttattaaatttggttaatttttatttttttaaatttttttgtagagatagggttttgttgtgttgttggggttggtttagaatttttgggtttaattgatttttttgatttagttttttaaagtgttgggattttaggtgtgagttatgtgtttggtttttagaaaatgatagagagtggtggggatgtttgggagaatagtattgtagatagggttttgaggtaaggttttgagttaggagtaaggagtatagtttggtagattggggggtaggtgaggaaagggtaggaggagttggggttagagagggagttggggttattttaggggtggttttgtaggtattgtaaggatttgggtttttattggtggtgaggtggggatgttatggatagtatgagaaatggtttggtttggtgtggagaatgtattttattgggagggtgttagggggagtttggttaggaagttggtgggaggttgggaatttaggttttggatttagttttttttttgtattgatttggtttttggtttgttttaaatttgaggtttgaattgttgaggttagaatttattatgaattttagtttggaggaaagatttttaggaaggttttgaagtttagttataatttgagtgatggttttattagtattataaaagttttaggatggggttttgtagtattgggtttgggtagtggtttagatgttgatgagtggtgtagtgttgggtaagtttttttatttattgagtagatttagttattttatttgtaaaatgggattaaatgttttggttgttttagtattaaatgagattgtttgaaagtattttttaaatattattattgattataaaaagtaaatgggaagttggagttgattttagagggttgatttggtatagtattttaaattttttgttttataaagtatgaggtgtgagtttgttttgttgttaggatttgttttttttttatttagtatttgttttgggtttgagagttgtggtgtggttgtgtgtataggagggagggaggtggtgtggggttttgggtagagttgttgagagttttggttttgtatttgatttgtgtttttttggtgggattttgggttagggtttttaggttggtgtgtagggtggggagtggttgtgggtgggaggatgggtggggtggtgggtggttatgtggtttgggtggagttgtttttgttttggtttttgtggttgttttgtttttgttagttttaggttttttgggtttgtgttgtgttgttttttttttgatagttgttgggggtgttttgtaagttgttttgtgtgttttgtttgtttgtttttgtgggttgttgtttgttatagttgtgttatgattatttagtagatagatttttagggtttggggttgtggggtttttgttttgtgggtggtaaggattttgagtagttttttgttattttttgggtaagagtagttgggatgtgtgtggaagtggggtgttatgggaggtgatatgtggagattggggttttgtgggtgtggttggggatggagttggaattgtagttgggtgtgtttaggtgtgttgttagttgagtgttttttgtgtgtttgggttttgttgttttttgttgtttttttgtggaggttgtgtttttgggttggttggtttgttgtgggtgtgttttgtgtttgttagaaaaaaagaaggtagtttttgttttttggttttggaagtgtggtggggtgggtgttagttttttgttaattagtgaggggatgagggtttttgtagattttgtgtgttgggagatggtattttttttttttttttagattgtagtgtagttgaatgtaataggaaagatttggaaagtgaggtggggtgggtgggaagtttattggggtggggggtaagtgggattaatttaaaaaaataattgaaatatgttttttggatttgatttatggttgaggtttgt

SEQ ID NO: 839 - DNA, 2388 bp, Artificial Sequence
  chemically treated genomic DNA (Homo sapiens)
aatttttattgaatttatttgaaggttttgtaggttttataataaattttatttagttttgtattaggtatgttatagaattaatgaatttggagatgaagttaggttttttagtttagtttgtgaggaagataggtgatttgaattttaagaatgtaaaagatgggttgggtgtggtggtttatgtttgtaattttagtgttttgggaggttgaggtaggtagattatttgaggttgggaggttgagattagattgattaataatggagaaattttgtttttatttaaaaatgtaaagttagttgtgtgtggtggtttatgtttgtatttttagttatttgggaggttgaggtaggagaattatttgatttttggaggtggaagttgtggtgagtggagattgtgttattgtatattagtttgggttataagagtgaaattttgttttaaaaaaaaaagtaaaagatattattaagttttgtggagtaaggtattttatattttatgagtgagttaagatgggttttataattttttaagtaaggaaatgggtttggaggttttgaatatttgttatttaatagtagaatagttattggaattaaaattttttgattttaaataatagttttgtttattattattaagtgaagttatttataattatatattgattattttaagtttttgtaagattggtttgttttggggaataggttttgagagaatattttttttaaggttagaataaaggtattttataggttttaggttgtgttttgagggtgtttatttaaatatgagttggagtaaaaagaaagggatgggggatttggagtaggtataggggtggtttttttaagtagggtggtttgggatttttaagggttagtgagaagagaatatatattttagtttttgttttatttggttagatattgatggttgggatgtttgataaggaatttttttttgttatattgagaaatatttgtagtggtttatttaggtttgatttttgggtggtgtgtgtgttgtgtgttgtgttatggtgttatgtggttagtgtgggtttgtggtgtgagtttttgaaattaggtggtagaggtggagttgttgtggtattgttgtgtttttgttgtgttttgggtgttttttgtggtggtgggttgttgttgggagaagtgtgaggggatagatttgtgattggtgtggtttttgttagtttattttggttaaaaaagaattgtatttttggagtgggttagtggtggtggtagtgggttgggatgagtgtgttttttgtagttttagtttagtgtggtgggggagtgttttatgttttgggttgttgttgtggttttttgtttttttgtttttgttaatttttatttatgtttgagagaaaggtttttgtttgaaggtagatttttgttaagtaaatttgagttttgttttttttttgggtttttattttttgtttttggtttggtttttgggttttgtttttagtttaagatttaattttttttttagttgttttagatgatgttatttgaaattttttggaaatatgattattttaatggaatattgttgttttggggaagtgttttatagttgttgggtatgttgtatttgttttatttaagtttttggtaattgttgtattttgaagatatgttgatgggaattattaggtggtgttggtttttaattggagttttttgtttttattagttatgtgttattggttagtgtgattgaaattaaattgtatgaaaatttttttttttagttgtattagttatgttttgagtgtttaatgtggttagtggtattggtttggatagtatagttgtaaaatgtttttatttttatagtaagttgttattgttttaggagatgggattgaattagaatttaaataaattttttagtgtttttgagttttattttagttatataataaggaatgtatttttgtgtaagtgtattttggttttttgttttgtagatttatttattaagtattggaggaatattgtaggtaaaaatgtttattggatttaaagagaggttaatattttttgaaatttttaagatatgttgtaataaagtaggtattgataaattttatataattttataaattatattgagaaagtgttttttaaaaaatgtttgttaaaaatttagtatgttatagtgttgtttagaattataaattgttttttatgtgtgtataaatttagttaataatataattattgtttgtaggttaattatatgataaatatagaatgtttagtggataaagaggaaattggttttttgattagtagtaggaataattattaataaattagaagtattaatgttatttt

SEQ ID NO: 840 - DNA, 2388 bp, Artificial Sequence
  chemically treated genomic DNA (Homo sapiens)
aaagtaatattaatgtttttgatttgttagtaattgtttttattgttagttaaggggttagttttttttttatttattagatgttttatatttattatgtggttaatttgtaaatgatgattatgttgttaattggatttatatatatataaggaatagtttatggttttaagtaatattgtgatgtattgggtttttagtaagtattttttagaaaatatttttttggtgtaatttataaagttatataaaatttgttaatatttgttttgttgtagtgtgttttaaaaattttaaaaaatgttggtttttttttggatttaataggtatttttatttatgatatttttttaatgtttggtaaataagtttgtaaaatagaagattaaaatgtatttatatagggatgtattttttattatgtgattgaggtaaaatttagaagtgttggaaaatttgtttgaattttaatttagttttattttttggaatggtaatagtttattgtgaggatgggaatattttatagttgtgttgtttaaattggtgttattagttatattaagtatttgaaatgtggttagtgtgattagagaagaggatttttatatgatttagttttaattatgttaattagtgatgtgtggttagtggggatagagggttttagttagagattaatgttgtttggtaatttttattagtatgtttttggaatatagtaattattaggggtttaagtaaggtaaatatagtgtgtttagtagttgtaaaatatttttttaaaatagtaatattttgttaaagtgattgtgtttttaagaaattttagatggtgttatttgggatagttgggagggaagttaagttttgagttgaaggtggagtttaaaggttgggttggaggtgggaaatggagatttagggaaggggtggggtttgaatttgtttggtgaaaatttgtttttgggtaaggattttttttttaggtatgggtgggggttggtagagataaaagggtaagaagttgtggtagtgatttggggtgtgaggtgtttttttgttatgttggattgggattgtggaagatgtgtttgttttaatttattattattattattaatttgttttagaggtgtagtttttttttggttggagtaagttgataaaaattgtgttggttataaatttgtttttttatgttttttttggtggtgatttattgttgtaaaagatatttgaggtgtagtagaggtgtagtagtgttatagtggttttgtttttgttgtttagttttagaagtttgtgttataagtttgtgttggttatgtgatgttgtgatgtgatatgtagtatatgtattatttggaagttaggtttgggtgggttgttgtgggtattttttagtgtggtgaaaggaaattttttgttaggtattttaattgttagtatttgattgaataaagtgggagttggagtgtgtgttttttttttgttgatttttaagagttttaggttattttgtttggaggggttgtttttatgtttattttaagttttttatttttttttttttgttttagtttatgtttgggtgggtgtttttgggatatgatttgggatttatgaaatatttttgttttgattttaaaagggatgtttttttaagatttgttttttaaagtgagttgattttataaaagtttagagtggttggtgtgtggttgtggatgattttatttagtggtagtgggtggggttgttatttgaaattagaggattttagttttagtagttgttttgttattgggtagtaggtgtttaagatttttgagtttgtttttttgtttgaaaaattgtgaaatttattttaatttgtttatgaagtgtgaggtattttgttttgtagggtttggtagtattttttgtttttttttttgagatggagttttgtttttgtggtttgggttggtgtgtaatggtgtaatttttgtttattgtaatttttgtttttagggattaagtggtttttttgttttagttttttgagtagttgggaatataggtatgggttattatgtatggttaattttgtatttttaagtagagatggggtttttttgttgttggttagtttggttttaattttttgattttaggtgatttgtttgttttggttttttaaagtgttgggattataggtatgagttattatatttggtttattttttgtatttttaggatttggattatttgttttttttgtaggttgaattggaagatttgattttatttttgaatttgttggttttgtaatatgtttaatataaggttgaatagggtttgttgtaagatttataaaatttttaaatggatttagtgagagtt

SEQ ID NO: 841 - DNA, 2256 bp, Artificial Sequence
  chemically treated genomic DNA (Homo sapiens)
aaatttttattataaataaattatattaagtaagttaaagatagtaaaagagtaaaaatgttagtagatatttttaaaatggtaattatatattatttttggaatgattatatgaatgtggtttattattttttaagtttttatagtaaatatatatttatttgttttatttagttaaaaataaatataatatgtagttgtttttgaataattttttttttttttttttttttttttttttttttgataaagttttattttgttatttaggttggagtgaagtggttttattttgttgtttattataattttagttttttgggtttaagtgatttttttgttttaattttttgagtagttgggattataggtgtttgttattatttttggttattttttgtatttttagtagaggtgaggttttatttgttggttaggttggttttgaatttttgattttaggtgattttttttgttttgattttttaaagtgaagggattataaggtgtgaggtattgtgtttggttgtttttgaataattttgattaaaatttatatttgatatttattttaatatatattatagatttttattgataattttttttagtaagaaagataagttttatttaggtatttgtgaattggaggttaagtagttttagtatattttatatttttttaagattttttttttattttaaatgtttgtaaattttgtatttgataaagagtatatttttatttaatataaatatgtttttttttttagatttttttagtatttgagagatttgtatgtgtgtggttttttattttttttttttggttttttaagtttttagggtgttgttaggaggaggtttgtgattataaattttttttgaaaattttttaggaagttttttttttttttggagaattgaagtgttatttgattttaatttttttgtaaattttgttttttagagttgtttgttattttttgtttttgttgtagattttttatttatttggattggtttttgattgtaattatttggtgtgttgggtagtgtttttgtttttagtagtgtttgtattttttttatttgattttgggttgtggttgtggttagttagttagttgaaggttttatgttgttttttgttgttggttttatgttgttttttgttgtttgttgtttgttttttttttttttgtagttgttgagtgtatgtggtttgttttattttttggtgattagttagttttttttttttttttttttggtgttggtggaagagttttttttgattttgttttttaaattttttggagggattgtggtatttttttaggtaaggggatgttgtgagtgagtgtttggaggaggtgttattaattttgagtatttagtgaatgtggtatttttgaagttgttttaggttgggttttttttgggggtattagttggaagtagtttttgttagagttagtgttggtaaggaaggaggattgggtttttttttatttgttttttatattgttttttggtttttttgtttttagttgtgtttttttgtttgttagtaaaggtgtgtttgagtgtgtttattttgttaaaaagaaatttgtttttgttttgttttttttttttgtgatataatttttttaattgttaaattgaattggggtgtttggtgttatagggaaagtatggtttttttttttaattataagaaaaagtaaaattatttttttttagttgtgagagttttattgagaattgaaattatttgtatgattagaaagtgtttttttatttttttaatttttgatttttaggagtgtggggtttattaagttagaaattttagtttaaaggattttttttggagagttggattgtttttttttttttttttttttttttttttgtgtgtaaaatggttgtttggggtaagggttttttagatgtgtatattgtttggtataagagtagattttgaaaagatgaggtttatttaatatggatgggggagaattttgtttgtaggtagataggaaaatggggagggagttattggaaggatggattttatttttaaagttataatttttagattagaaaaagtgtttagtgttttagaagtagagttgtatagtgatttaaagattagttttaaatattgttttgttttttttatattttttatattttttttttttattgaaaatattttgtattttttgtaattataaagggggaagg

SEQ ID NO: 842 - DNA, 2256 bp, Artificial Sequence
  chemically treated genomic DNA (Homo sapiens)
ttttttttttttataattatgaaaaatgtaaggtatttttagtaggaaagagaaatgtgagaagtgtgaaggagataggatagtatttgaagttggtttttggattattgtgtaattttgtttttagaatattgagtattttttttggtttaggaattatgattttgagaatggagtttgtttttttaatgattttttttttatttttttatttgtttataggtagaatttttttttgtttgtattaaataaattttatttttttagagtttgtttttatattaggtaatgtatatgtttgagaaatttttgttttagatagttgttttatatgtaggaggggaaggggaggggaaggagagagtagtttgattttttaaaaggaattttttgaattagggtttttgatttagtgaattttgtgtttttgaaaattaagggttgagggggtagggggatattttttagttgtataggtgattttgatttttggtggggtttttataattaggaaagaatagttttgtttttttttatgattaaaagaagaagttatattttttttatgatattaaatattttgatttaatttggtagttaggaaggttgtattgtggaggaaggaaatggggtgggggtggatttttttttaatagagtgaatgtatttaaatatgtttttgttggtaggtgggggagtgtggttgggagtagggaggttggagggtggtgtggggggtaggtggggaggagtttagttttttttttttgttaatgttggttttggtgagggttgtttttggttggtgtttttgggggagatttaatttggggtgattttaggggtgttatatttgttaagtgtttggagttaatagtattttttttgagtatttgtttatggtgtttttttgtttggaaagatattgtggtttttttagaggatttgagggatagggttggagggggtttttttgttagtattggaggaagaaagaggaggggttggttggttattagagggtggggtggattgtgtgtgtttggtggttgtggagagggggagagtaggtagtgggtggtggggagtagtatggagttggtggtggggagtagtatggagtttttggttgattggttggttatggttgtggtttggggttgggtagaggaggtgtgggtgttgttggaggtgggggtgttgtttaatgtattgaatagttatggttggaggttgatttaggtgggtagagggtttgtagtgggagtaggggatggtgggtgattttggaggatgaagtttgtaggggaattggaattaggtagtgttttgattttttggaaaaaggggaggttttttggggagtttttagaaggggtttgtaattatagatttttttttggtgatgttttgggggtttgggaagttaaggaagaggaatgaggagttatgtgtgtatagattttttgaatgttgagaagatttgaaggggggaatatatttgtattagatggaagtatgttttttattagatataaaatttatgaatgtttgggataaaaagggagttttaaagaaatgtaagatgtgttgggattatttagtttttaatttatagatatttggatggagtttattttttttattaggagggattattagtggaaatttgtggtgtatgttggaataaatattgaatataaattttgattgaaattatttagaagtggttgggtgtggtgttttatgttttgtaatttttttattttgggagattaaggtggggggaattatttgaggttgggagtttgagattagtttggttaataggtgaaattttgtttttattaaaaatataaaaagtagttgggggtggtggtaggtgtttgtaattttagttatttgggaggttgaggtaggagaattgtttgaatttgggaggttgaggttgtagtgaatagtgagatggagttattttattttagtttgggtgatagagtgagattttgttgaaagaaagaaagagagaaagagagagagaaaaattatttagaagtaattatatattgtgtttatttttaattgagtagggtaaataaatatatgtttgttgtaggaatttaggaaataatgagttatatttatgtgattattttagaggtaatatgtagttattattttgggaatatttgttaatatttttgtttttttattatttttagtttatttgatatagtttatttgtgataagagttt

SEQ ID NO: 843 - DNA, 2226 bp, Artificial Sequence
  chemically treated genomic DNA (Homo sapiens)
ttggtttgtaatatattatatatttaaaagaattattatttttttgaatattattaatattaataatagtattatagtgattaagagtggatttaaataaaggttggtttgaaatttaggtttgttatttattagtaagtttttaaaaattttgagtttttagtttttttatatgtgaaatggagaaaataaatttgtaaaattaattaaatttgtttatttatatttttttttttagtgtatattaattggtattttttgttaggttagaatgtgtttttaattatgttttaaatttgttttgtgttaattttattgttagaattttttttattttgagaattagaaaaggaaatattatgtttggtaatgtttatattttttaaaataaatttgtaggaaagaatatttagtaagtgatgagagtagtaatgattgtttttattattttaaatttataatattattttttttagagttttttaagtattgtagataattttttatttattaaaaaataaattgtaattataagtatttagggttgatattgtttttgaattagatagtgtttatattagttgtataagattaatttaaagtagaggatgaaattttttttttgaattttttttagaatgtaatttagtgaatatattaaaattaaattttttttgaatgggagtaatttttatggattaatttgtaattttttagattatatttaaggtaatgtagaggttgttgtattataggttttgtgattagagattattggatttgtttttggaaaagttatttatgattttttgggttttggtttttttattttttatattggtttaataatgattattgtagagttgttatggaagttaaatgaatttatgtattataagtgattaatataatgattgatatttagtgatttattaataaattaaaatatttattattaatatgatagagaaggtgttgttaaaatagataataggtttttggaagaggtgattaaatggatgtaaaatttatggattgtttattttgtttatttttgttgtgttttttggttgtggtatatatatgtgtgggtataaaattgtaaattttatgtagttgtgtagtgtatgtgtagaaggtttagatatgaaatgttattttagtaatgtgtttagagaagttttgatgttgttttggaagtaagttgttgttgtttgatttttgggtgtttgggatggatgtttatatttgtatttagtagtattggaaggggtttaggttttttgtagtatagtttatttttagattgtttagttttttataatatatatttttatggaaaagggtatttttttttgttagaaaaagtgttttagtttggtttgggttggtttttattttatgttgttgtaagtaggtgaagttttttttgtttttttttttggggtaagtggaaaggagtttggtagggggtttgtagtggtttgtataggggaattgggtagtgagagagttttaggtaattttgggggttgttttatagaagtaggtggggattgatagtggttttttggtttagggaggagagtgtggttgtgggtttttttttttagtttggaggttgtagttgtttgagttggtttgggtgggggtggggtgggggtggtgtggagggtatggagattatggtggtgttatttgggatatttagggttttgaggttttgggtggtttttatgtgagattgtaaattatgataataggtagttatttgaggttaaataaaaatggagtgggttttttgtgtgttgttgttttttgtgtttttggtggttttttttgaggtttttggtggttttatgagtttgtagtagttggtggtgatgttgtttttgttttatttttttgtgtaagtgtgaggttgttggtagtgtggtgtatgttttggttgtttttggtttttgtgtaaaatttttattttgtttatgtgaagttgttgttgttttagagagggggaaagagttgtgggaaaagttggggagtgatgattgtggtggttgggtgtgtttttttattttttttttttttttttttttttttgttgtagtttggagttttggtttttttttttttttttttttttttggagttggtttttttttttgttttgttttttttttgtttgtgtatgttatttgttgtggggtggttgaaggggatgttttg

SEQ ID NO: 844 - DNA, 2226 bp, Artificial Sequence
  chemically treated genomic DNA (Homo sapiens)
taggatattttttttggttattttataataaatagtgtatataagtgggggagaagtggggtggagggagaagttggttttgagggggaggaggaaaggagaggagttaaaattttggattgtgataggggggaaaggagaagaaaagaaaatgagagagtgtgtttagttgttgtagttgttattttttggttttttttgtagttttttttttttttttaaggtagtgataattttatgtggataggatggaagttttgtgtggaagttgggaatggttggagtgtgtgttgtgttgttggtagttttgtatttgtgtagggaggtggggtgggggtgatgttgttattggttattgtgggtttgtgaggttgttgggggttttgggggaggttgttagggatgtggggggtggtggtgtgtgggggatttattttgtttttatttgattttgggtgattgtttattgttatggtttgtgattttgtgtggggattgtttagggttttggggttttggatgttttgggtggtgttgttgtaatttttgtgttttttgtgttgtttttattttgtttttatttgggttgatttgagtggttgtagtttttaggttgaggggagggatttgtgattgtgtttttttttttgggttggagagttattgttgatttttatttgtttttgtggggtagtttttggaattgtttggaatttttttgttatttagtttttttgtgtaggttattgtgggttttttgttggatttttttttatttattttaagggaggagatagaagggattttgtttatttgtaataatgtgaaataaaaattaatttagattagattggggtgttttttttgatgggaggaaatatttttttttgtggagatatatgttatgaaggattaagtggtttggggataggttgtgttgtgaagggtttgggttttttttagtgttgttgggtgtaggtataggtatttgttttagatgtttaaaggttaggtagtaatgatttatttttaaggtggtgttagagtttttttaggtatattgttgaaatgatattttgtgtttaagttttttgtgtatgtattatgtgattatataggatttatgattttatatttatatgtgtgtatgttataattaggggatatagtaaaggtagatggaataaataatttataaattttgtatttatttaattattttttttaaaaatttattgtttattttagtggtattttttttgttatattgataataaatgttttaatttattgataaattattgagtgttaattattgtattggttatttatggtatatgagtttatttaatttttatgataattttatggtggttattattaagttggtataaaagatgaggaaattaaagtttaaagaattatgagtgatttttttaaagataaatttagtggtttttaattataaagtttatgatataataatttttatattattttaggtgtggtttaagagattatagattaatttgtagaaattatttttatttaaagaaagtttagttttaatatatttattaagttatgttttgaaaaaggtttagaaaaaagattttattttttattttaggttggttttatgtaattgatatgagtattgtttaatttaaaagtagtattaattttgaatatttatggttataatttattttttaatgagtggggaattatttataatgtttaagaggttttagaaaaggtggtgttgtaaatttaaaatgataaaggtagttgttgttgtttttattatttattgggtgtttttttttgtagatttattttggagggtgtaggtattgttaggtataatgtttttttttttggtttttaaggtagaaagggttttggtagtggggttggtataaagtggatttggagtatggttgagagtatattttggtttaatgaggaatgttagttaatatatattggagagaaaaatatgaatggatagatttaattaattttgtagatttattttttttattttatatgtgagaaaattaagggtttagaatttttagaagtttgttaataaatggtagatttgagttttaagttagtttttatttaagtttatttttagttattgtgatgttattattagtattaatggtatttagaaaaatagtaatttttttaaatatgtaatatattataagttaa

SEQ ID NO: 845 - DNA, 2301 bp, Artificial Sequence
  chemically treated genomic DNA (Homo sapiens)
aatatttagaataaatggagatttgtaaattaatagaaagtaggtagtaaagttaaagaaaatagtttaaggtatagttattaaaaggaatgtgattatgttttttgtagggatatgggtggagttggaagttgttagttttagtaaatttatataggaatagaaaattagtgagattgtatggttttatttataagtgggagttgaataatgagaatatatggttatatggtggtgattaatatatattggtgtttgttgagtggggtgttggggagggagagtattaggaagaatagttaagggatattgggtttaatatttgggtgatgggatgatttgtatagtaaattattatggtgtatatatttatgtaataaatttgtatattttttatatgtattttagaattttaaataaaagttggatggttaggtgtggtggtttatgtttgtaattttagtattttgggaagttgaggtgtgtagattatttaaggttaggagtttgagattagtttggttaatatggtgaaattttgtttttattaaaaatataaaaattagttagatgtggtatgtatttataattttatttatttgggaggttgaagtagaattgtttgaatttgagaggtggaggttgtagtgagttgttgagattgtgttattgtattttagtttgggttatagtgtgagattatgttataaaataaaataaaataatataaaataaaataaaataaaataaaataaaataaaataaaataaaataaaataaaataaaaaaataaaataaaataaaataaaataaagtaatttttttttttttaagtggtttttattttttttttttgttttgtgaagtgggtgtgtaagttttgggattgtagtggttttagggaatttttttttgtgatgttttggtgtgttagtttgttgtgtatattttgttgtggttttttttttgttgtttgtttattttttaggttttgttggggatttgggaaagagggaaaggtttttttggttagttgtgtggtgattttggggattttagggtgtttttttgtggttgatgtttggggtgtagtggttgttggggttggggttggtgggagtttgtgggattttttagaagagtggttggtgttgtgatttagtattggggtggagtggggtgggattatttttataaggtttggaggttgtgaggtttttgttggagttttgttgttgtagtttttgttattagtgagtatgtgtggtttgtgtttttggggatggggtttagagtttttagtatggggttaatttgtagtattaggtttgggtttttggtagggttttttgtttattttgagatttgggatgggggtttaggggatttaggatgtttttagtgttgttagtggtttttagggggtttggagtgttttggggagggatgggattttgggggtggggagggggggtagattgtgtttattgtgttttggtatttttttttgggttttagtaaatttttttttgtttgttgtagtgttgttttatattgtggtttattttttagtttgaggtaggagtatgtgtttggtagggaagggaggtaggggttggggttgtagtttatagttttttgtttatttggagagatttgaatttttttatttttttgttgtgtggtttttattttgggttttttttttgttttttgttttttttgttatgtttgttttttgttttagtgttgtgtgaaatttttggaggaatttgtttttttgttttttttttgtatttttgatttttttttgggttgttgtgaggtggagttggtttggtttttatattttgtatttttttttttttgtaggttgttgtgtggttttgtgtatgttgttggtagattagggttagagttggaaggaggaggtggtgattgtggagatgtggtaggagggtttatttaaagttttttgtgtaagtgattatgtttgggtaaggggagggggtgttgggttttagggggttgtgattaggattgggggatgtttaagtttagtgtttttttttgagttatgttttttttaatagttatatgggtagttttttaagttttaggatggagattttattttgtattagtttaatattattttgtgttatttgggttgtatttttggtgagttttgaatttttaagtttagggtaggtatgggtaagtttttgtttttggagtttttttgtttaaattagttgttttgtagttttttggagtggaggaaattgagatttattgagg

SEQ ID NO: 846 - DNA, 2301 bp, Artificial Sequence
  chemically treated genomic DNA (Homo sapiens)
ttttagtgggttttagttttttttattttagagggttgtggggtagttgatttaaataaaagggttttgggggtagaggtttgtttatgtttgttttggatttggaggtttaagatttattaagggtgtggtttaggtgatgtaggatggtattggattggtatagggtgaggtttttgttttggaatttggggagttgtttgtatagttgttgggggaggtatggtttagggaggggtattgagtttgggtgttttttgattttagttatagttttttaaggtttagtattttttttttttgtttgggtatggttatttatgtaggaggttttgagtgagtttttttgttatgtttttatggttattattttttttttttagttttggttttgatttgttagtagtatgtgtagggttgtgtagtggtttgtggggagggagaagtatgagatgtggggattgggttgattttgttttgtagtaatttggggaggggttaggagtgtagggagggaatagggaaataggtttttttgaagattttatataatattggggtggggagtaggtatggtgggagaggtggggaataggaaggaggtttggggtaaaagttatatgatggagggataagggggtttggatttttttgggtgggtgaggggttgtgggttgtagttttagtttttgttttttttttttgttagatatatgtttttattttgaattgggaaatagattatggtgtagggtggtattgtagtgaataaagaaaagtttgttggagtttgggggaggatgttaaggtgtggtgagtgtagtttgttttttttttttgtttttggggttttatttttttttgaggtgttttgggttttttgaaagttgttaatggtattggggatgttttgggttttttaggtttttgttttgggttttgaggtgggtgaggagttttgttgggagtttgggtttgatgttgtgggttggttttatgttgggagttttgagttttatttttggggatgtgggttgtgtgtatttattggtggtgaagattgtggtggtgaaattttagtgaaggttttgtggtttttgagttttataagggtggttttgttttgttttgttttagtgttgagttatggtgttggttgtttttttggagggttttgtggatttttgttggttttagttttggtggttgttgtattttgggtgttggttgtagaggggtgttttggagtttttggagttgttgtgtagttggttggggaagttttttttttttttttaggtttttagtggggtttagggagtaaatagatagtaggaagaggattgtagtgaagtgtgtgtagtgaattggtgtgttgggatattgtggggggaaattttttaagattgttgtgattttggagtttgtatatttgttttatagggtaggggagaggggtggaggttgtttagaggaaaggaaattgttttattttattttattttattttatttttttattttattttattttattttattttattttattttattttattttattttattttgtgttattttattttattttatgatgtagttttatgttgtggtttaggttggagtgtagtggtgtgattttggtggtttattgtaatttttgttttttgggtttaagtaattttgttttagttttttgagtaggtggaattataggtgtgtgttatatttggttgatttttgtatttttagtagagatggggttttattatgttggttgggttggttttgaatttttgattttaggtgatttgtatgttttggttttttaaagtgttgggattataggtgtgagttattatgtttggttgtttaatttttatttgaagttttggggtatatgtagaggatgtgtaggtttgttatataggtgtgtgtgttatgatggtttgttgtatagattattttattatttaggtattaagtttagtattttttagttattttttttggtattttttttttttagtattttgtttaataggtattagtgtgtgttgattgttgttatgtgattatgtgtttttattgtttagtttttatttataagtgagattatgtggttttgttggttttttgtttttgtgtgagtttgttgaggttaatggtttttagttttatttatgtttttgtaaaggatatgattatgttttttttagtggttgtgttttaggttattttttttggttttgttgtttattttttgttgatttgtagatttttatttattttagatatt

SEQ ID NO: 847 - DNA, 2485 bp, Artificial Sequence
  chemically treated genomic DNA (Homo sapiens)
agtttttgtggatgaattgtaatttagtttaataggtagataagattgaaaatttaatttaggagtatgtgtttttaataatagttgagttttggttaattttagtggttatattttaattatttatatattgttgagtgtttaaattgtgtttaaagaaggtaaaagttaatttgtaattaatttagttgtttttttgttttatttttaatttttgtatgttatttttttttttttgtttataaatatgttttgattatgaggtatttttggagtttttgaatttgttgtgattttggaagttgttttatttgtaaattatttattatttaattaaattgttttaaatttaattttgttgaagtttttttttaataggtttagaaaaaataatggtaaaaatgaatgaaaatttaataattttggaagtagaaaaggttgggggttttaataagtgtaaatagttttatttttatattttttttatggtaattataatttagtatattatatatatatttttttgttttttgtattttggtttagggtaaagttttttaaaataggtattgttaattagtgttattaagaaggtttggatgttgttttgtgggaatattttaaagaggaatgtttaaaaggaaaagggggatgggttgggagaagggtattaggtgggtattttaaaattatttttagggttataggtttaatttatttggttgtggatgttagagttgttatggtaagaaggaagtaaagttttttgtaataattaaagtttttagaagtagtgtgttttattgtttattagtgtgttgtgaagtttggtgtttatttatagggttttttttagtattgtttaggttttttgagtgttttagtatagtagtttggagtttgttggtttggtgattaagatatattttagggaatatgttatgtagtggagttttttttttggtattgtatagtaaaaggaaagggttgttgggtgtttgtgggttttgggtagttatagaagttattgtgttggtggggaggagggggattgatgtggtttatgttttgggtagttttattttttttgtttgtgaagggtttttgtttggtgggaggagagaggtgtgttttatttgggtttttttatatttgttgttgtttgggttgattttgtgggttttgtttggtgttttagttgatttttgtttagttttgggtttatgggtgtggttagtagggtgggttagggtggtggggtgtgatattgggaggaagtgtgggttgtttgtttgggtgtgttaaggaagttgtttaaaatgaggaagagttgtgggtttggtggttgaggttattttggtggtggttggagagtgaggaggagtgggtggttttgtgttgtgtttgtttttgttttatttggtgtaggtaggtgtggttgtgttttttatttggttgggattttttggtaaggagaggaggttatggggaatgatgtgttgtttttatgtttttttttgttttatttttattggttgaggtaaaagtgttgaaattatgtgaataaaatataggtgggttttgttagttttgtttttgaatttatttgtgtttgggatttagaagttgtgttgggagagaggggtttaggtttgggtggaggggatggaggttagattgtgtggaaagtgatttgggtattttagggtgtttaggtttttagggagtgtggaaagtgtggttgtggtttggtttttgggagatgtgggattgggattaggtatagtgtgaggaagttgattttggagttagaatatttttttttggttatttatatgaatttattggaaaatgttgtagtgtttattaaagttatttaaagtagaaatgtttagatgttttatgagtttagataaattttttattataaaaagaaatagtagttgtatttaaataataatttttttgaattattattaaaatttagtataattatttttgtggatatatttttattgttaagtaatttatttagttaatgaatttggagagtaagaaagttttatgtagtaaaatgtaaatttgagttaagagttaagggtgtttttttttgtttgtttgtttgtttttggtaatgtggttttaaaattttaagtttatttaaaaattatataaatgtaatttatttttttgttggaatgtttaaggattagaaagataattggagaagtgagagtttgaatttttttttatgttggaaatagtgttgtaaaatattttttgagttttgtttgatttagtaaagatttagttgaatttaagtagagtttaaagtattgtagtgtgtagtaaaaaaaaaaaagagttgaagatgttgtgttatatttgatttttggtattaaaaataaaaaaaggaattatttaatttttaagagtttttggaagaaatggaattgattttattatttgatttttttgttttagt

SEQ ID NO: 848 - DNA, 2485 bp, Artificial Sequence
  chemically treated genomic DNA (Homo sapiens)
attaagataaagaagttagatggtagaattaattttattttttttaggaatttttagggattaaatggtttttttttttatttttaatattaagaattagatatggtataatatttttaatttttttttttttttattatatgttgtaatgttttgaattttatttgagtttgattgaatttttgttaagttaggtaaaatttaaaaaatattttgtaatattgtttttaatgtaaaaaaagatttaaatttttatttttttaattgtttttttagtttttgaatattttaataaaagaatggattgtatttatatagtttttaggtgggtttaaggttttggagttatattgttaaaaatagataaatagataaaaagaaatatttttaatttttaatttaaatttatattttattatataaaatttttttgttttttaagtttattggttaagtaaattatttgataatgaaaatgtatttataagagtaattatgttaaattttagtagtggtttagaagggttgttgtttgaatgtaattgttgtttttttttgtagtaaaagatttgtttaagtttataagatgtttggatatttttattttgagtaattttgataaatattgtggtattttttagtggatttgtgtaaatggttaaaggaaaatgttttagttttaagattgatttttttgtgttgtgtttgattttaattttgtgttttttgagggttgggttgtgattgtattttttgtgttttttgggggtttgggtgttttggggtgtttgggttattttttgtatggtttgatttttgttttttttgtttaggtttgagttttttttttttggtgtagtttttggattttgagtgtgggtaggtttaggagtgaagttggtggaatttatttgtattttatttatatggttttagtatttttattttggttgatgaaggtagaataagaaagggtatgaaagtagtgtgttgttttttgtaattttttttttttattagaaagttttggttgggtaggggatgtggttatatttatttgtgttaggtgaggtgagggtgggtgtagtgtggggttatttgtttttttttgttttttagttgttgttggggtggttttagttgttgggtttgtggtttttttttattttgggtaatttttttaatgtgtttgggtaggtggtttgtatttttttttagtgttgtgttttgttgttttggtttgttttgttgattgtgtttatgagtttggagttgggtgggaattggttgaagtgttgggtgaggtttgtggaattggtttaggtggtggtaggtgtagaggagtttgggtggggtgtgtttttttttttttgttggataagggttttttgtaggtagagaaggtggggttgtttgggatatggattgtattggttttttttttttttgttagtgtggtggtttttgtgattgtttaggatttatagatatttagtggttttttttttttgttatgtagtgttggggaagagattttattgtatggtatattttttggagtgtattttggttattaaattaataagttttaagttattgtgttggagtatttgggaggtttgggtagtgttgagagggattttgtaggtgaatattagattttatggtgtattagtgggtaatggggtatgttgtttttgaaggttttaattattataaaaggttttgttttttttttattatgatggttttgatgtttataattaaataaattaaatttatagttttaagaatggttttgagatatttgtttgatattttttttttaatttattttttttttttttttggatatttttttttaaaatgtttttataaaatggtatttagatttttttgataatattggttggtagtgtttgttttaaaaagttttattttaagttaaaatgtgagaagtaaaaaaatatatatataatgtgttggattgtaattgttatggagaaaatatagggatgggattatttatatttattggagtttttagttttttttgtttttagggttattggatttttatttatttttgttattattttttttaaatttgttaaaagaaaattttagtagaattaaatttaaagtagtttaattgagtaatgaatgatttgtgaatggggtagtttttagaattatagtggatttagagattttagggatgttttatggttagaatatatttatagataaaaaaagggaagtgatatatagaaattggaggtaaggtagagaaataattggattggttataggttggtttttgttttttttgaatatagtttgaatatttagtagtgtatgaatggttgaagtatggttattgggattggttaagatttagttattgttaaaggtatatatttttaaattaggtttttaattttgtttgtttattaagttaggttatagtttatttataaggatt

SEQ ID NO: 849 - DNA, 2424 bp, Artificial Sequence
  chemically treated genomic DNA (Homo sapiens)
taaaaataatatagtaattttttagatttgtagaatgtttttttgtttataagtttgttttatatatattatgttttttaaatgatatattagttttttgagggtaatttatattggtaatagtttttagatgtggaaattgtgaagataatgttggtgatgtggaagtaatataaattttggagttttttagatttaggtttgaatgttagattgttttttatttagagtaattttagagtattattttttattttaatttttttttaggtttttttgtgtttatgtgttttttttatttttgtttattgtttatttagtgatttttgtatttttttttattgttagtgtgtagatatatagtttttttggttttgagatttatgttaattttattttattattttgttagtttatttaatttttattgagtaatgttagttgaaagttgtggtgggattaaatgttgtaatgagtatttaaatgaggttgaagtatttatgtattttatttatatatggtgaggtatatttaaggaaggttgtagttattaaaattttaggaaataattttttatttttttaggtgaaagggtttttaggtttttgtgttttggaaggtttatttatagttattttttaaatgataatgtgattgatgagtttagagtttagtttaaatagtaatggattggaagattagtttaggttttattaatgtggaatatagaataaattatgtttttgttttagtttgtttatttgtgaaatagagtttattatatttagttttttttgtttttaggtttgagttattttttttggttaaggtaagtaaatgtttatgatgtttggttgtgtataagataaagttataataaagttataatttattttttttttgtagaagattgtaaaaagtaaaagagatttaggtaaaaattttggaatgatttttggaatagagagtttttttagaattagaagttaaaggaatttaaaatatagggaggtttagggtttttattgatataaaggaaagatgttttttttataggtttatgtttatattttttttttttttttatttttatttgtatttttatttttatatagggtttatgggattttttttataaaagagtagttgtagtaatttatattattttttatgtttggttgtttattaagaggtgaaaagtagttttatataggttttatttttggatagttttagttgtaaagtttaaaatatgtgaaggtaatttggaaaagtaagtggttgtatataaagtaaatgtttatagagttttggataaaattgagtgtttatgtgtatatggtaagtgtttttagtgtttgtgtgtttatttgtttgtttgggtgattttgtttttgagagtttggatgagaaatgtatggttaaaggtaattttagataggaagaaaggtagagaagagggtagaaatgatttttgatttttggggttgagggtttttagagtaaatggtataatgttatgaggtttgatttatttttatgatggaatttaaggttttagtaagtatttgttggtttggttatggtttgttttttagtttgtaggagatttttttatttttttatttgtgtgtttttattagttttgaaaagaatttttggtagttaggagtaggtatttttattgtttttttttttttttttttgtttttattttgttggttttttagattgggttttggaattaaatttggtgagtgttggtttttaggaaatttggagttttggtgtttaaattttggtttaggaaagtaggagttatttaggaagtaggggttttttagggttagagttagttttttttgtttttgtttatgttgtgttagtatttgtttttttaaagttattaggtaggtgttagtgtgtggtgaggggaggggagaaaaggaaaggggaggggagggaaaaggaggtgggaaggtaaggaggttggtttggtgggggtgggatttgatttgtaaattgttgtatttgttttttattttttagtgttttttttgagattttggggagttagtttgttgggagagtgggatggtttggagtaagtttagaggtagaggaggtgatagagggaaaaagggttgagttagttgttttagtgttgtataggagttgaagggatgtattatgttagttttagtttggttttagtgatagttaatgttttttgtagtgtggtggttttgaagttgttgtttggagttgtttttttttttttggtgaagtttttaaaagttgttaaagatttggaggaagtaaggaaagtgtttggtaggattgatggttgtttttgttttttttttttttattttgtttttttttattttgtttttttttttttttttgtttttttttttgtag

SEQ ID NO: 850 - DNA, 2424 bp, Artificial Sequence
  chemically treated genomic DNA (Homo sapiens)
ttgtgggagagaagatgggggagggggggaaggtagggtggggggaggtggggtggagaggaggaggataaaggtagttgttagttttattaggtattttttttgttttttttgagtttttagtagtttttaaaaattttattgaagaggaaagggtagttttgggtggtggttttgaagttgttgtgttgtaagaggtgttggttgttgttggagttgggttggggttggtgtggtgtgtttttttggtttttgtatagtattggagtggttagtttggttttttttttttttgttgttttttttgtttttgggtttgttttggattgttttgtttttttagtaagttggttttttgggattttggagggggtgttgggaggtggagagtaaatgtaatagtttgtgagttgggttttgtttttattgggttggtttttttgtttttttattttttttttttttttttttttttttttttttttttttttttttattgtgtgttaatgtttgtttagtggttttggagaaataagtgttggtgtagtgtgggtgagggtaggagaggttagttttagttttggaggatttttgttttttgaatagtttttgtttttttaaattaaggtttaggtgttagggttttagattttttggaggttagtatttattaaatttggttttaaagtttaatttaaaaaattaatagggtggaggtgagggagggaggaaaaggatgataggaatatttgtttttggttgttaggggttttttttaggattgataagagtgtgtagatgggagagtgggagagttttttataaattgaggagtaagttatgattaagttagtagatatttgttgaaattttagattttgttatagggatagattgggttttgtggtattgtgttatttgttttaggaatttttagttttaagaattagaggttatttttatttttttttttgtttttttttttgtttggaattgtttttaattatgtattttttatttagatttttaaaggtaaaattatttagataagtaggtaaatatataaatattaaaaatatttgttatgtatatataggtgtttaattttgtttagagttttgtaaatgtttgttttgtatgtagttgtttgtttttttaagttgtttttgtatattttaaattttataattggaattatttaaggatagaatttatatagggttgttttttgttttttgatggatagttaggtgtagaggatgatgtgggttattgtaattgtttttttgtggaggaggttttataagttttgtgtaaaggtggagatgtaagtgggaatggaaagagagagaaaatgtaaatgtaaatttataaggaaaatattttttttttatgttagtagagattttgggtttttttatgttttaaatttttttgatttttgattttggggaggttttttgttttaaaagttattttgagatttttgtttgggttttttttgttttttgtagttttttatagagaaaagatgggttgtagttttgttgtagttttattttgtgtatagttaaatattataggtatttatttattttgattaaagaaggtaatttaaatttaaaggtaaggaagattggatatgataggttttattttatagatgaataggttgaaataaggatataatttgttttatgttttatattagtaaaatttaaattagttttttagtttattgttatttgagttagattttagatttattaattgtattgttatttgggaaatggttataaatgaattttttagaatataaaggtttgaagatttttttatttgaggaggtgaaaaattattttttgagattttaatggttatagttttttttgaatatattttattatatgtaagtagaatgtgtagatattttaattttatttgaatatttattgtaatatttaattttattataatttttaattagtattgtttaataggaattgagtgggttggtaggatggtagaatggaattaatataggttttagagttaggagaattatgtgtttatatattaatagtgaaggaaggtgtaaaaattattgaatgaataatggataggagtgaagaggatatatagatataaagaggtttgaaaaaaaattaaggtgagaaataatgttttgaagttattttgaataaaaagtagtttgatatttaaatttgggtttgaaagattttaaagtttatgttgtttttatattattaatattgtttttatagtttttatatttgaaaattgttgttaatataagttatttttagaaggttagtgtgttatttaaaagatataatgtgtatagaataaatttgtaaataggaaagtattttataaatttgaaggattattatgttattttta

SEQ ID NO: 851 - DNA, 2479 bp, Artificial Sequence
  chemically treated genomic DNA (Homo sapiens)
taaaggagttttttttttttttatttttttggtattttttttgttttttttttgttatttttaggtggatttagatttaaggtttagatttgtaaggtaggaaaatgttgtaggtttaggttgggaaagggtttaaagttgttagtggattgttgggatttagtttttttttttttattaagagagtgagttttattgggtttaaaatgattttaagttttggtttttgatattaggggaaagagatgggggtgatagaattatagaatttttgttatgtttttttaagtgtgtttagagatgtgtgtgtgtgtgtgtgtgtatatataaatgtttgtttatttttaggtaggaagggtggatgtagttatttatatatggtttgtttttttggaggataattttatttgataaataattgtttttatttgaatagaataaataaggttttatgatgaagtaaaatattaaatatatatgtattaaaaaatgtataattatttttttggaatgggttatatagagatgtgttttttaaaatgttaagagtgtaaaaggataaatagtgaaaaataaattttttttttattttgttttttagttttttaatttttttatttagaggtgagaatagaatttttatattttttagaatttttatagttagaattgtttatatgtttttattgtttttatttttatttttgtttgtataaataaatgaattgtttattatggaaattttttaaaagatttgttaatattttaataggaagtattaatagtttatgttttaggattttgtttttataattttgtaatattatattatgatatttaatttaatttttattaagttttgttaaaaatggattttaaattaagttgtaaatttttagtaatttggttttgtttttttttttttgatagtattattaaataaatttttttattgttgaaagtaataagtttggttttgttttatttattggttgtgttggtgatatttggggattgttattgaatagatgtatagagggagtttttataggtaggggtttttttgtttgtgtttttgggagagtatgttttgtatatttgttgtgttgatgaagattttatagttttattagttgtgggtaagggggtttgaggtagttttaggtaagttggggtttagtggggagaagttgtagaagaattgattagaggattttaggaggttttagagttgggtgaggtagagagttttttgtgtgtttttttttttttttgtaatttggggattttttgtattggggtaggtttttggttaggtgtatgggaggaagtatggagaatttataagttttttgattttttagtttagatgttgttgggttttttttgttggagattgtgttttttttaaatttttgtgagtgttgtggaagtatgtggggtttgggttgttgagtgttgtaagataggggagggagttgggtgggagagggaggggtggtgttggggtgggttttgatatagagtaggtgttgtgggttgtagtatagtgtggagattgtagttttggagtttgggttagggtttatttgtttttgtagtgttggtttgtgtttttttgttgtagttattggtgagtgttgtggttttgagatttttgggttggatgtgtggtggttttagtttttgagtgtttgttttttttgttttgggttgtttgggttttttgggttttttggtggttgtatggagttaaggtgttttgttttgggtgttttttgtgggtgttgatttaggttgtttggagtttggagtttagagaggagagagatagttggggagtttggttattgtgggtattttttttgtgttgtagttgtttgtttggtttgtttttttgtttttttgttttttgttttgattttttttttttttgtagagttgttgtttagtgttttgattttgttattatgagagttttgttggtgtgtttgtttttttgtgttttggttgtgagtgattttaaagtgagtgtgtttttgttttgattgatgttgtttaaggatttttgattagtattaggggagaggaggggttgtttagggagttggggttttttggattttatttatagtagggttagattttttttaggaaatgggatagggtggtagtggaggtttgagaattatgggggttggtattggttggtaagggaggaagaggttgttgggattgttttagtttgtgggtatttggtagatgaagtttgtttgggttaatttattttttttggttggaaatttatggttttttatttgagaattagatatgaatagggtgaggtgagagggagagggaagagtgggttttgggattggggttagtttatttttattttggagtttttggagtatgggatttttgatgaagtttttttttgaattttttttagggtagtaatgaattttattaagtt

SEQ ID NO: 852 - DNA, 2479 bp, Artificial Sequence
  chemically treated genomic DNA (Homo sapiens)
aatttgatgaagtttattgttgttttggaagagatttgggaggaggttttattaaaggttttatgttttagggattttagggtgagggtaaattggttttaattttaaaatttattttttttttttttttttgttttattttgtttgtatttagtttttaaatggaagattatgggtttttagttaggagaaatggattgatttaagtaagttttatttattagatgtttgtaggttggggtagttttggtggttttttttttttttgttagttagtgttaatttttgtggtttttaagtttttgttgttattttgttttattttttggggagagtttggttttgttgtggatggaatttggaggattttagttttttgagtagtttttttttttttttggtgttgattagaggtttttgggtagtattagttaaagtaagagtgtatttattttggagttgtttatgattaggatgtagagaagtaggtgtgttagtagggtttttatggtggtgaggttggggtgttagatggtggttttgtaaaggaaggagaagttagggtaagaggtggaggaatgggaaggtaggttaggtgggtgattgtagtgtaggggagatgtttgtggtgattaggttttttagttgttttttttttttttgggttttggattttgggtagtttggattggtatttgtgggggatgtttgggatggggtgttttgattttgtgtagttgttggggagtttagggagtttgggtagtttagggtgggggaggtagatgtttgggagttggggttgttgtgtatttggtttggggattttaggattgtggtatttattggtggttgtggtaggagggtgtgagttggtgttgtggggataggtggattttggtttgggttttggggttgtggtttttgtattgtgttgtgatttgtggtgtttgttttatattagggtttgttttggtgttgttttttttttttttgtttggtttttttttttgttttgtagtgtttagtgatttggattttgtgtgtttttgtaatgtttataaagatttgggggaagtgtgatttttagtggaggggatttaatagtgtttggattgaggaattgagaggtttgtaaattttttgtgtttttttttatgtatttggttgggggtttgttttagtgtaaggagtttttgaattgtagagaggagagaaggtgtataggagattttttattttgtttagttttgaagttttttggggttttttaattagtttttttgtaatttttttttgttgggttttaatttgtttaagattgttttagatttttttgtttgtagttgatggagttgtgaagtttttattaatgtgataaatgtatgagatatatttttttagaagtatagatagaaaaatttttgtttgtaggggttttttttgtgtgtttgtttagtggtagtttttagatattattaatataattagtggatggaataaagttgggtttattgtttttggtagtaagggggtttgtttgatggtgttattagagggggaaaggtaaggttagattattgaaaatttgtagtttggtttaaagtttgtttttgatagggtttgataaggattgggttaggtgttgtgatatgatgttataggattgtgggaataaagttttagggtataaattgttggtgttttttattgaagtgttaatgggttttttgggaagtttttataatgagtaatttatttatttgtgtaggtaagaataaaagtaaagataatggaaatatgtagatagttttaattgtggaggttttggagggtgtggaagttttgtttttatttttgagtagaggaattgggagattggaggataaaataagaggaagatttattttttattgtttgtttttttatatttttaatattttaaaaagtatatttttgtatagtttattttaaaaagataattatgtattttttaatgtatgtgtatttagtgttttattttattatagagttttgtttattttatttagatagaaataattgtttattaaataaaattgttttttagaaaaatagattatgtgtaaatgattgtatttattttttttgtttgaggataagtagatatttgtgtatatatatatatatatatatgtatttttgggtatatttggaggaatatagtagggattttgtgattttgttatttttattttttttttttagtgttaggaattagggtttggggttattttgaatttagtaggatttgtttttttagtgggaaggaggaggttgagttttagtaatttattagtggttttgggtttttttttagtttaggtttgtagtatttttttgttttgtaaatttggattttgggtttgggtttatttgagagtgatagaaggaaggtagggagagtgttaggaaggtaggaaggaggaaggtttttttg

SEQ ID NO: 853 - DNA, 2484 bp, Artificial Sequence
  chemically treated genomic DNA (Homo sapiens)
ggtagtttttggtattttggattgtgaattgaaagggatttttgaagatattaatttgaatataattttaaaaattttttagtttttattgtttttttgatgaattttgtataaagataggagtttttaggagatattttgtgaaagttatagtagaagggaagttgaagtttgaaaatatattatattttgttttttggtttttaaatttttttagttaaaaatttaggtaaaattattatatttaatatagtaattatttgtaaaattttagaatagtaaataaaggatataaagaaatgtatttttattttttttaaattgaaaataagtaaaatattatagaattagattttgttttattatataggaattgtttggtaaagattttttttttttttttaaaggtgaaattttaggttgttgaatattgaatgggtaaagatttttataatgttgtatttaagtgagtattaatgattttatttattaataatgattattttttgggaataagaatttattaggaagtaatttttaaaattttataaaggatttaattggtttttataatatggttagtagttatatgtaaattttatttggaagattggggtgaaattaaggggttggtgaaggaatttaggaaaattaaaatattaaatttatttttaatagttgataatgttatgttttaagagaagaaaaagagtatattttgttatagtgtgtgagaaatttaatttttgtttttggatgatggtggtatgttattttttttaaagttaggtattagtgtgagtagtgttttagagaggtgaatgtgtagttgtgttagatatttatagttttatttttaaaagatatatgggaaaatagttaaaagtttttttataattgtattaatttgattaataggaaaataagtggaaaatgtagttttattaaagtagagtagaggtttttttttattaaatttttaggagggggaggggagaatatagaatggttagggggtattttttggaagttgaagagagattaaatgatgatttttatattttttttgttgtttaagtgttgaaattaatttagattttatttttttttttatgttaattttggattttttgagtaatttggagtttatgttttaggttttttgaagattagaagtttaagaagatgggaatttttagaataataattaggggaaattgtttatttgaagggttaagggtagggggttgtgtttggtattttattgagattttgtttattgaaaatattgtttttaatgaaattatttagtattttgttttatttgtgtggttgttttttttatagtggtgtaatttgtgttagttgattgtttttaggattgttgtaaattttttgatgagtagtatttagaaggggttttagtaaaaattatgtgttttaaatttttaaagttttgtttgggagagaggttgatatttgtatatgaagtttgttttttggaaatagtaggaggatgtaggaggggtgaagtaattttgggaagatgttttttttttttttttatggatttagtgtagtttttggtataagtaattttgttattgggtggttttttttaatttgtgtgggggttgatattaatataagtagttgtttttttgggtgtgagtgggattttaggtttgggatgtggtgggtgtggtgtgggagaggtatttgttgttttttttatttggatgttagaggtaagttgtttgtgtgaatttgagtgaatgattggaggttggttgttgtaggtttatttttttaggatgtgggttttagggggtgttttgatgtgatttaattttgattgtgaaaataattgttaggggttggttggattgttgttggtttttttttttttggtggttttgtttggtttgggtttagtttgggaataaatttgttttatattaatatttttttttatattgggtgttgttgttttaattgtgtgtggggggtgaggtgtttattttgtataagaatagaggagtgggggagaagagatggttttgttgtttattgggtaagtggagtttagttttgtttgggagtgggtaggagagatagggtagtgatttttatttatattagaaaatttttttttttggtgattttgttgttaatttgagttggttatagatagtttagtgagtttttaattataaggatgagagaaaagtatggtgttttttgagttttttttgtttttttggttttaatttttgtttaggttttaggtttttttttttgtgtggtttggatttttttttagttatgattttggtgggatttaaaaggaaggaggtggtggggtttatggaagaggatatttaggagttagggagaagggttagaaaatgaataatgtgattttagaggtggaattttgattttttttattttttattttggttttatttggagatgaaagtt

SEQ ID NO: 854 - DNA, 2484 bp, Artificial Sequence
  chemically treated genomic DNA (Homo sapiens)
agtttttgtttttgggtgaagttggggtgggaaatagagggggttggggttttgtttttggagttatattatttgttttttagtttttttttttggtttttgggtatttttttttgtaggttttgttatttttttttttttggattttattaaagttgtagttgggagagagtttaggttatataaaggggaagatttggagtttgggtgggggttaggattgagggggtggagaggatttgaggggtattgtgttttttttttgtttttgtaattaaggatttattggattgtttgtagttgatttgagttggtagtaaaattgttggggggaggggttttttggtgtgagtgggggttattattttgttttttttgtttgtttttgagtggggttgggttttgtttatttagtgagtagtgaggttgtttttttttttttgtttttttgtttttgtgtggggtgggtgttttgttttttatgtgtagttgaggtgatggtgtttgatgtagaaggaagtgttgatataaaataagtttgtttttaaattaaatttaaattaagtaaagttattaggaggggaaaaattaatagtaatttagttagtttttagtaattgtttttatggttggaattaaattatattaaaatgttttttgaaatttatattttgaaggagtgaatttataatagttaatttttagttgtttgtttgagtttatatgaataatttgtttttaatatttgagtgaagggggtggtgggtgttttttttgtattgtatttattatattttggatttgggattttatttgtatttgaagaggtggttgtttatgttaatattagtttttatatgaattagaaaagattgtttggtgatagaattgtttatgttaggaattatattgaatttgtaagggagggggaagaatgtttttttggggttattttgttttttttgtgtttttttgttgtttttaaaagatagattttatgtgtaaatgttaattttttttttaaatgaagttttagaaatttggggtgtatggtttttattaaagttttttttaagtgttgtttattagaagatttataataattttaaagataattagttaatataagttatattattgtaaggaaaatagttatgtaaatagagtaaggtgttgggtgattttgttagaaataatgtttttaatggatggggttttagtaaaatattaaatgtagttttttatttttggttttttaagtaaatagttttttttagttattgttttaaaaatttttatttttttgagtttttaatttttaggaaatttggagtataggttttaaattatttggggaatttagagttaatatgaaggagaaagtgggatttgaattagttttagtatttaaatagtgggggggatgtaagagttattatttaatttttttttggtttttagaaagtattttttggttattttgtgttttttttttttttttttgagggtttgatgaaaaggaatttttattttgttttggtgaaattgtattttttatttgtttttttattggttaaattggtgtagttatgggaggatttttgattgtttttttatgtgttttttaagaatggggttataaatgtttgatatagttatatgtttatttttttgggatattatttatattggtgtttaattttaagggaagtgatatattattattatttaaaaataaaaattgggttttttatatattgtagtagaatatattttttttttttttttgaggtatagtattgttagttattaaaaatggatttaatgttttaatttttttggatttttttattaattttttaattttattttaattttttagatagaatttatatgtgattattggttatgttgtagggattaattggattttttgtaaagttttaaaaattgttttttagtaaatttttatttttaagaagtagttgttattagtaggtgaagttattagtgtttatttagatatagtattgtaaaaatttttatttatttaatgtttagtagtttgaaattttatttttaggaaaaaaagagggatttttgttagataatttttatataatggagtaaaatttgattttgtagtgttttgtttgtttttgatttaagggagatgaagatatatttttttatgttttttgtttattgttttgaagttttatagatggttattgtattggatataataattttgtttagatttttaattgagggggtttgagaattaagggataaaatgtaatgtgtttttaaattttagttttttttttgttgtaatttttataaagtattttttgaaaatttttgtttttgtataaaatttattaaagagatagtggagattggggaatttttgaggttgtatttggattggtgtttttaagggttttttttagtttgtagtttaaggtgttagggattatt

SEQ ID NO: 855 - DNA, 2487 bp, Artificial Sequence
  chemically treated genomic DNA (Homo sapiens)
atattgtaattgtgggttttggtttttatgtgtgttgtgttggatattagtgttatggtttaaattttttatagttttttagttttttttgttgtggtttttagagttttggagagttagttgttttgttttgatttgggttattaggttttgtttttttatgaggtgtgtggggttaatatttatgttgggtttttagtttagaatgaaaatttatttttaaagaatttgttttaagaatttgatgaagtaagtattggttttttttttgtttttaatgtgtagtggtgttagtgtttagtagttttgattaagtggttttgagtataagtggtgtttttattgggaaagataggtatttggtagttggtggttttttttattttgtttgtattttttagtgattttttttttattaaaatggtattttgggagttgtggagtgttatggtgatttttttaattgtttttggagtttaaatttgaattggtttgtggttttgagtattattttatatattttagttttggttttttagagttttgtttttgtgtggtttttttttgttgttgagttataatttttttttatttttttttttttttggtgttggttggtgtgggttggggttaggtggagaagttgttttttgttaaggtgatagaatgtgttgggggtgggggttggggttagggttggtgtaattagggggttgttgtttttttttggatatagtggaagttttttttgtattattaaatttttgttattttttttgagggatttgtttttaggtagtatgtaagttgttgttttgggtttattttgtatttttttattgggtgaggaaggagtattttgaatggagatgggggtgtttttggtttatatatttgtagagaagaggtgtgttgggttgtatttttggaggttgtggtaattgatattagagaagattttggttgtagttgggaaggtttattggttggaaagaggtgttttttttttttagtaaagggttttgtttggaagggttgttttttatttgtttagtggtattataggatggttggtttttatttgaatttttttggatggtattattatatagttgggtttttgtagtgttggttttttaatttgatgattgttattttggtgaggatttgtgttgatggttggagaattttgtgttgtgggtgtatatggttaggtggtgtttggtaggtgatgtttgggtgtaggatggtgtttttattgttttattttaaattgttgtttgggtttaggttttttggttttttgaataggggtttggggggttaaggatgttgaggttttgggggtaggaagttttttttggttaagtgtttttttttttttttggtatatatttttttatttatttattttgtttatttttggggtgagaggtttattaaggtagggtgtgttttttttatgaattattttaaggtttttgagttgtgggggttttgggtaattatttttttttttttttggttttaggtattttagtttaggggtttgtagagaagtttgaagtttggataaatgtgttggatgttaataattttttatttttggtagtagtaaaggttaatatatttttattttttattttagtttgttattaaaataaagttgtgtgtggttgagggtaggaaggtgttgagattgagaagaagggatgttttggagaaagtgtgtttagttgattttagaaattagagttttttgggattttgttgagattttttgtagggtgttttaatttgtttttttattgtgtgttggtgttgtagtgtgtgtggtttagggtttggtgattttggtttagtttggtggttgtggtgaggtttttggtgtagttgtttggaattttgtattagaattgggattgtgtaaatgttttggttgaagtgttattttatttaagaaatattgttgttaggaataaaatggggtttttggtgttttgaagtattttttgaaatttttttaaaataatttataaaaaatgtttttgttttaatgttttataatgtttaaggaaatatgtaaatggtttgtttttttattgagatggttgttttaattaatagtgtatatatatataataatttttttaatttttttttttagagttaagtattttattatatgtaaattataataaagaaaagattgtgtaagattatgtaagttgattgatttaaaatattgagttttaatttaggttttttgtttttttatttaataatttttgtgtttggattagattggtgaagtaggttatggaaattaataaagtaaaaaattaaaagtatttttttttgttatttttttttttaaaattaaataatagttgtttttttttgagtaggttttagttttaggtttgagtttttttgtgattattttatagttatttatagtagttgttgttgtttttgttgggtttt

SEQ ID NO: 856 - DNA, 2487 bp, Artificial Sequence
  chemically treated genomic DNA (Homo sapiens)
aaaatttgatagaagtagtaatagttgttgtgggtgattgtggggtgattgtaggaaaatttgagtttgggattgaagtttgtttaggaaggggtgattgttgtttaattttggagggagggatggtgaaggaagatgtttttaattttttattttgttaatttttatagtttgttttattagtttggtttaaatataaaagttgttaaatagaaaaatagagggtttggattaaaatttaatattttaagttaattgatttgtatgattttgtataattttttttttattataatttatatatagtgaagtgtttagttttgaggaggaaagttggaagaattgttatgtatgtgtatattgttagttaggatgattattttgataaagaaatagattatttatatgtttttttaaatgttgtaaaatgttaaagtaaaaatattttttgtaagttgttttaagaaaattttagaagatattttggagtattggggattttattttgtttttgatagtagtgttttttgaatagggtgatattttagttagggtatttgtgtggttttgattttaatgtgaagttttaagtggttgtgttaggaattttgttgtgattgttgggttaagttggagttattaagttttgagttgtatgtgttgtgatgttggtatgtagtaggaaaatagattaaaatgttttatagaaaattttggtgaagttttggaggattttggtttttaagattagttgggtgtattttttttgggatgttttttttttttggttttagtgtttttttgtttttagttgtgtgtagttttgttttggtggtaaattgaaataagaaatggaaatatattggtttttgttgttgttagggatgagaggttgttgatgtttggtgtgtttgtttgggttttgggtttttttgtagatttttggattggggtgtttgaggttaggagaggagggggatagttgtttggagtttttgtggtttagaggttttgggatgatttatggggggggtgtgttttgttttggtgagttttttgttttgagggtaggtgaggtgggtgggtaggggagtgtatgttggagagaagagagaatgtttaattagagagaattttttgtttttggagttttagtgtttttagttttttaaatttttgtttaggaagttgaaggatttaggtttaggtaatggtttggggtggggtggtaagagtgttgttttgtatttggatgttgtttgttaggtgttatttggttatgtgtgtttgtagtgtagggttttttggttattagtataggtttttattgaggtgatagttattggattgggaaattaatattgtgaggatttggttatgtgatgatattgtttgggggaatttgagtggaagttgattgttttgtggtgttattagataggtgagaagtagtttttttaaatagggttttttgttggaaggaggaggtatttttttttagttagtgagtttttttagttgtaattggggttttttttaatattagttattgtggtttttagaggtgtagtttggtatattttttttttgtagatgtataaattggggatatttttatttttatttaagatgttttttttttatttagtagaggggtgtggagtaaatttgggataataatttgtgtgttgtttggaagtaggttttttagaaaggatgataaaaatttggtgatgtggaagaagtttttattgtgtttaggaaagggtagtggttttttagttgtattggttttggttttggtttttatttttagtatgttttgttattttaataaagagtggtttttttatttgattttaatttgtattagttagtgttgaggaaagagaggaatggaagggagttgtggtttagtggtgaggaagagttatgtagaggtaaggttttgaggagttaaggttggggtgtgtagggtggtatttagggttgtggattggtttggatttggattttagaggtagttggaagggttattgtggtgttttgtggtttttagggtgttgttttggtgaggagggggttattgggagatatgggtggggtaagaggggttattggttgttaagtatttattttttttggtgaaggtgttgtttgtatttgggattgtttggttaaggttgttgggtattggtgttgttgtatattgggggtagagagggagttagtgtttgttttattggatttttaaagtagattttttaagagtggatttttattttgaattggaggtttagtatggatgttggttttatgtattttgtagagggataggatttggtgatttaggttagagtagaataattggttttttagggttttgaaggttataatagagaaggttgggaagttgtgggaggtttggattatgatattgatgtttagtgtggtatatgtggggattggggtttatagttgtggtgt

SEQ ID NO: 857 - DNA, 2491 bp, Artificial Sequence
  chemically treated genomic DNA (Homo sapiens)
tttatttaaaaattttaagtttaggttgggtatagtggtttatgtatgtaattttagtatttggagggattgaggtgggtggattataaggttaggagattgagattattttggttagtatggtgaaattttgtttttattaaaaatataaaatttagttgggtatgatggtatgtgtttgtagttttagttatttgggaggttgaggtaggagaattgtttgaatttgggaggtggaggttgtagtgagtggagattgtattattgtatttgtttggtgatagagtaagattttattttaaaaaataaataaagaaaatttgaagtatagtatttttttaaattttaaatagataatagaaattggtttttttttatttaaattagaatttaagtttaattttatatatttttgatagtttggattttgttttttaattttataaaattgggaatttaagtattatttggtttgatttaaatgtaatgtagaatttgtattaaaatattatattaaagttttagatttgtagtagttaatagtatttttatgtatgtgttagggattgttttaaatattttatatatattaatttttttattttgtatttttgtttttgttttatatagtaggaaattgaaatattgagaggttaagtaattaaagttatagagttagagtgataggagtaaagttttaatttaggtaatttagatttttagagttttgatttttattattaagttgttagtatagtttttttggtaattatttttaatttaaatataatttgagtgatttatttaataagttattattttgataatttagtgatttgtaatgtaaaattatttattgtaatttatttaatattattgtttttttgtgttgtaaaaattatagtaattgagatgtaatttattatttttttttttatttttggtattttgtgttaatttttttgttttgtggattttttttgattttttattatgtgtgttaattgttattaatttttttgtttgttggggattggggttgtgagggtatatttttgaggggtatggggttagggttaggtaggttgtgtggttgggtggggttttgtgttttattgtggagtgtgggttgggaagtggagagagaagtagttgtgtaatttgttggatgtggattagggtgttttttatttttgttgggagtttgttgattggttgggtgtgggtgtatgtgattgatatgtggttgtattggtgtagtttgttagggtgttattggagatagaatggaggtgttgttggatttggaaatggggtaggtgttggagttattatggttaggtttgttgtggggggaggggggaaggtggtttttttttgtattgttttaaattgatggtttttttttggtatagggtttattgtagtatgttaaatgaggaggtaggggtgttgtttttttgttttttattgtagtattggagatggattttttgtattttggatttagggtttttgatagaagaggaagaagggggaggggtagaagtgttaaggggagtttgttgagaaaagttgtttttgaagttagaaggggtttttgtttttataatgttatttgatagagtggaataatagtatttaaggaaatgggtagaggataataaagaatggagtatatttatggtgaggagtaaaagttttattttattgaaaggtttttttttttttttggtgataaggatatatgtattggtggttaaaagagagaggagataaaattgttgtagatggttgatgtgaatttagtggaaagagttattggggatgagagaaagaggaggaggtaggtattgtagagtgtgagtggtggtgttggttggtgaaatattggttattagtagtgtgtttgtttttgtaaaatatttaagtaaattttttgtgaatagggtggtaaatagatattagtgtttttgttagttataaaatgtagtggtagtggttttttgtggatgattgtagtagtgttttttttttttttgttaggttgaaaagataattgtagaggaataagaaattttgtagtaaatgttggggtagaagtttatttataagaagttatagtttataaatgtagtttgaatagtagaaaaaaaattattgttttttaaagtaggaataatgttaggttatgaatgttttgttattggaatgtattggatattttgattttatattatgaaagtgatgtttaaattttttgatttaatataaattttatatgaaattttaataaattatgtatgaaatagtggatttttttttttgttagtgaagtttttatgttattaattaggttatttaagagtaaattattttataatgtaaattattttgttaaaaattatggtgaataaatttttgtaggtttaatatttaagatttatagttaagtaattttatatttttttttggttgtttttagataata

SEQ ID NO: 858 - DNA, 2491 bp, Artificial Sequence
  chemically treated genomic DNA (Homo sapiens)
tgttatttaaaagtaattaaagagaaatataaaattatttaattataggttttaaatattaggtttataaaaatttgtttattataatttttgataaagtaatttatgttgtaaagtggtttgtttttgaatgatttaattaatggtataaaagttttattaataaaagaaaagatttattgttttatatataatttattaagattttgtataggatttatgttaaattaaagaatttgagtattatttttgtgatgtagaattaaagtgtttaatatattttaatgataaaatatttatagtttgatattatttttattttaaaaaatagtaattttttttttgttgtttaggttgtatttataaattatggttttttgtaaatgggtttttattttagtatttgttgtaaggttttttatttttttgtagttgtttttttggtttaatagagggagaaaaagtattgttgtagttgtttgtaaaaagttattattattgtattttgtaattaataaagatattggtatttgtttgttattttgtttatagggagtttatttagatgttttataaaagtaggtatattattggtgattagtattttattaattaatattattatttatgttttgtagtatttgttttttttttttttttttatttttagtagttttttttattagatttatattagttatttgtagtggttttgtttttttttttttttggttattaatgtatgtgtttttgttgttagggaggaaaagaagttttttaatggggtagagtttttgttttttgttatgaatatgttttattttttgttgttttttatttgtttttttagatattgttattttattttgttaaatggtattataaaaataaaaattttttttggttttaaaaatagttttttttagtagattttttttaatatttttatttttttttttttttttttttttgttaaaaattttggatttgaagtataggaaatttatttttagtgttgtagtggggggtggggggatgatgtttttgtttttttgtttggtatgttgtagtggattttgtgttaaggaaaggttattggtttaagatagtgtgagggaaaattatttttttttttttttttgtagtaagtttggttatggtggttttagtatttattttatttttgagtttggtagtatttttattttgtttttagtgatattttggtgggttgtattaatatagttatatgttggttatgtgtgtttatatttagttaattggtgggtttttgatgggaatggggagtgttttggtttgtatttagtggattatatagttgtttttttttttgttttttgatttgtattttgtagtggggtatagggttttgtttaattgtatagtttgtttagttttagttttgtattttttgggggtatgtttttgtggttttagtttttagtaagtaaggaagttgatggtagttgatatgtatagtaaagagttgggggaggtttgtagggtagaaggattagtataagatgttggaggtgggagggagagtaataaattatattttgattgttatgatttttgtagtatagagaaataataatattaaatgaattataatgaataattttatattataagttattgagttgttagagtgatgatttgttagatagattatttgaattatatttgaattaaaaatagttattagaaaagttatgttagtagtttagtagtggagattagaattttggaagtttgggttgtttgagttgaagttttatttttgttattttagttttgtaattttagttatttaattttttagtgttttaattttttgttgtataaaatgggaatagaagtatagaatagaggagttaatatatatgaagtatttagagtagtttttgatatatatatagaagtgttgttagttattataaatttgaggttttaatgtagtattttaatgtaaattttatattgtatttaaattgaattaggtgatgtttaaatttttaattttatgaggttgaaggataaaatttaaattgttaagaatatataaagttaaatttaaattttggtttaaatggggggaaattagtttttattatttatttaaaatttaaaaggatattatattttaagttttttttgtttgttttttgagatagagttttgttttgttattaggtgagtgtagtggtgtaatttttgtttattgtaatttttattttttgggtttaagtgatttttttgttttagttttttaagtagttgggattataggtatgtgttattatgtttagttaagttttgtatttttagtagagatggggttttattatgttggttaggatggttttaattttttgattttgtgatttgtttattttggtttttttaagtattgggattatatgtgtgagttattgtgtttggtttaaatttaaagtttttaaatgaa

SEQ ID NO: 859 - DNA, 2425 bp, Artificial Sequence
  chemically treated genomic DNA (Homo sapiens)
gttttagaataatataaattaaagaattaatgataatgttttttatttttaaagattttagaagttgttttttgtaattagataatataaattttgaatttttttatatattgttgttaattttttgggtttttttttttttttaagaaagagaaagttatagaggagtgattgattgggtaggtggtggtagttttagttttttttaatgtttttggttgtttttttttttttgtataaaattaaaattaataatgattaaattaatattaattaaggtttttttgtttttaattttttttagtgatttgtttttatttttggattttttttaagtatatttttgttggtagtatttgttattattgatgtttttttattttttttttgtgtttttttaatggtgtaaatggatttagtttttaagtttttttttttataaaattttgtttttttttttttttagatatatttttggtatttttttttttataaggttttatttttttatatatattagttggtgttttttgttttgttttgttttgttttgttttgagatagttttgttttgttgtttaggttggagtgtaatggtgtgattttggtttattgtaatttttgttttttgggttttagtgatttttttgttttagttttttgagtagttggagtggtattatgtttggttaatttttgtatttttagtagagatggagttttattatgttggttaggttggtttggaatttttgattttatgattagttgatgtttttaaagatatagtgttttttttaaggtatattttagtttttattatgaggatttttttatggatatttagtgttttttttttgatttttagtgttttttttgtgatttataaattgtttttttttttagggtttataatgttttatgttttttaggttttgtttttattttttgttaaagaatatttatttgttagttttggaaatttatttttttatgttagtattttagagtattatttgggttttttgttttttttttgggattttattatttttatttagagtagagggtgaaggttttttgagtgtaggggtttagttatttgagaaattttatagtttgttttttgtttaggaagttttagtgagtttatgttgtgtagttgtagttttaatttatttgtaatttttgtgtttttttgttgttatggaaattaaggggttattgttaagtagtagttttttagaatatgaaattaaggtataattagaggatgggagggatagaaagagttaagtgttttttggggttttggattggttatttagtttgtttttggatgatgtaaaaggaaagagatggaagaggaagaattttatttgagtttgttataaagtgtttgttttttagtttttatttttttagttgtggtttattgtattatagtaattgttgtatgaaggttagaattgttatttattgtttaaagtagttgtaagaagaggttttaattttttattttttttgttttaatggaggtttttagttttggtaaatataagtaataaggattgttgggggggtggagggaaataattatttttagtatgtgttgtggaatgaaaggtttttgttatagtgttttttagaaattgtagttttatggagaggaatatttaatattagagtgggtataatttttatggaaatttagtggatagattggagatttgtgtgtgtttgtatttgttaatagttatggattggagtgttatgtttttgtattttgaaagtagaaattaggttttaaaaagatatgtataattttttagggagattataatttttatttagttttaggagtttggggtaagtagttttgtaaggttagtggtttgtggggatgtagtgagtgttgaatttgtttggggtaggggaaatgtgttttggtttatgtttgtgtatttgtagttttattttttagttttagtgtttgttattttttgggtttagtttgtttttgttttgtttttgttgatgtaattgttattagttaatggggtggttgttttgagggataagtggtaagagttaatttttttggtgaaaatgtggagaaatgggattagttattgtttttgtttgttatgttagatttattttatagagatagtggtagagttggtagtggatggtttttgtattgttgtttttttagggggtgggaagttggtaaggaagtagtttgggttagttaggggtggggttatgttatattaagagggtttggagaagtttaagggaggaattttgtaaagaagaggggtgattttttttgtgtttttggatagttaattgttttagtgataggatgagagagttttttgtgttttgagggattgagtgggtgaaaagtgttggagag

SEQ ID NO: 860 - DNA, 2425 bp, Artificial Sequence
  chemically treated genomic DNA (Homo sapiens)
ttttttggtgttttttgtttatttggttttttagaatatgaagggtttttttattttgttattaaaatgattagttgtttggagatatggaaaaagttgttttttttttttgtaggattttttttttgaatttttttaaatttttttagtgtgatgtgattttatttttagttaatttaggttgtttttttattagttttttgttttttggggaggtggtaatgtaaagattgtttgttgttagttttgttgttatttttgtggggtgaatttaatatggtggataaagatagtaattagttttgtttttttgtgtttttgttaagaagattggtttttattatttgttttttaaaatgattattttattgattggtggtgattgtgttgatggagatggggtaaaagtaagttgaatttgaaaaataataaatattggggttgaggggtggaattatgagtgtgtagatatgggttagagtgtattttttttgttttaggtaaatttggtgtttattgtgtttttgtaggttattgattttataagattatttgttttagatttttggggttggatgggaattgtagtttttttaaagagttgtatgtatttttttaaggtttagtttttgtttttaaaatatgaaaatataatattttagtttataattgttgataagtataagtgtgtataggtttttaatttatttattggatttttgtgagaattgtgtttgttttggtattggatgtttttttttataagattatagtttttaaggaatattgtggtgaagattttttattttgtaatgtatgttggaaataattatttttttttatttttttaataatttttattatttatatttattgaaattggagatttttattagggtggaaagagtgggggattgggatttttttttatgattgttttggataataggtagtgattttgatttttgtatagtaattattgtgatgtaataagttgtaattggaagagtagaggttagagggtaggtattttatggtaaatttaggtagaatttttttttttttgtttttttttttttatgttatttgggggtagattgggtggttaatttagagttttgagagatgtttggttttttttgttttttttattttttgattgtattttgattttgtattttgagaggttgttgtttagtggtagttttttggtttttgtggtaatggaaaagtgtgggaattatagataaattaaaattgtgattgtgtggtgtgagtttgttgagattttttggatgggggataggttgtggggttttttagataattgggtttttgtgtttaggaggtttttattttttgttttgggtaaaggtagtagagttttgggaaagggatagggggtttaagtgatgttttggggtattggtgtgggagagtggatttttgaagttgatagatgggtattttttgatggggggtaggggtggaatttgagaggtgtaaggtgttgtgaattttggggaggggggtagtttgtaggttgtgagggaagtgttgaggattaggaagggggtattgagtgtttgtgggggaatttttgtgataggaattggaatatgttttgagggggatattatgtttttaaaaatgttggttggttatgaggttaggagttttagattagtttgattaatgtggtgaaattttgtttttattaaaaatataaaaattagttgggtgtggtgttgttttagttatttaggaggttgaggtaggagaattgttagaatttgggaggtggaggttgtagtgagttgagattgtgttattgtattttagtttgggtgatagagtgagattgttttaaaataaaataaaataaaataaaataaaaaatattggttggtatgtatgagaggatgggattttgtggaagaagaggtgttaggaatatgtttgggaaggggaggagataggattttgtgggagggagaatttaagaattggatttatttgtgttattgagaaagtgtaagagggaagtagaggagtgttagtagtaatagatgttgttggtagggatgtgtttgaggaggatttagagatgagagtaggttattgggaaaggttaggggtggggaggttttgattggtgttggtttggttgttgttgattttggttttatgtaagaaaaagaaaataattagaaatattggagaaagttaaggttattattatttatttggttagttatttttttgtagtttttttttttttggagaaaggaaaagatttaaggggttggtagtaatatgtgaaaaaatttagaatttatgttgtttaattataaaaagtaatttttagaatttttaaaaataaaggatgttgttattagttttttggtttgtattattttaaaat

SEQ ID NO: 861 - DNA, 2452 bp, Artificial Sequence
  chemically treated genomic DNA (Homo sapiens)
agagatttttagattttgagtagtttgagatgttagtaattgtagttgttttaagtttgggttttgttttttagtgggatttttgtttagatgaataatttattttttgtaattttttaaaagtaaaattgtaaatgttttaggtatagaaaggaggtaaaggtgaagtttaggggaggttaggggtgtgaggtagatgggagtggatagatatattatttatttttgtgtttgttagaagaattagtagatatttttagaattgttttttatttatgttatttttataaattatttgtaaatgagggttatttggtatttttgttattttggagttatagaaataaaggatgataagtagagagttttgggtaggaggtaaaagttttgtgttttaattatagttatttttttgttgtatgatttgagttaggttattagatttttttgagttttagtttttttagtagtgtatatgggttatgtggggagtatttaggagatagataatttatttgttaaatttttttttttttggttaataaagttgttgtaattatagggattttttttgtttaggtgagtgtagggtgtagggagattggtttaatgtttaatttttttgtttttttggagattaggttgtttttttttggtagtttttttaatttttttttttttggaagtatgtgataattaataattttgtatatttaagtttagtggattttaatttttttatttgtgaaataaatgggattgaaaaattattttggttttaagatgttttgttggggtgtttaggtgttttaggtgtttttgggagaggtgatttagtgagggattagtgggaatagaggtgatattgtggggtttttttggaaattgtagagaggtgtattgtttttataatttatgaatttttatgtattaatgttatttttttgatttttttagttgtattgggtaaatttttgtttgttagagtgggttagtggtgagttagaaagggggtttattttaatagtgttgtgtttttttggagagtgttaatttattttttaagtaaaaaaagttagatttgtggtttattttgtggggaaatgtgtttagtgtattaatgtaggtgagggattgggggaggagggaagtgtttttttgtagtatgtgaggttttgggattggttggtttgttggaatttggttaggtttagttggtttggtgttgggtagttaggagtttgggttttggggagggtggttttgggtggtgtggtgggttgagtgtgggttttgtttttttgaggtgggtttgggtggggtggttgtatattagggttgtgttgagttgtgttagttgaggtgtgagtagttgttgaagttagttttttgtggagttggagttgggtgtggatttgttgaggtattgaggtatttagaggaggtgagagagtggtggtagataataggggattttgggttggtggtttagagttgagttaagtgtgtttgtgtgtgtttttgtgtgtttgtgaggatgtgtgtttgtgggtgtgtgttgtgtttataggtgtttttgtggtaggtgaatgatgggtgtgggttggtgtgtgtttggtttgtgtatatggtgtttttaagtgtgtgggtgatgagagttgggatgtgttggagattttggggtggagagtgggattataagtataggaatttttggttatgttttttgtttttggaaatttagttggggtgagggagggtgtggatgggattgttttgggagtttgtttttggttgtggttggttttaggttttaggtgtagtttgtttgtggtgtggggatgaagtttgtgtttttggaggggtttaggaagggtgaggaaagtggagtggagtaagtttgtttaggattggttttgggtggttttgggatttaatttgtgttgttttggtttaggttttaggtttaggttttttatgttattgtgtttattatttggttgagtgttgaggttagtgtgggttgttttttggtttttgggaatgtgttaggatttgttttttaaggattagtgaggaggtgatttattgtgataaggagattttagggaatggattgtatgaggttagaattttgtttgggatggggtatagtgggattttagaagtttttttttttgtttttttgtggtttttgtttttttattggtatagtgatttatttggttggaatagtttgtttttaaggaagttgggtattggaggtttgggatattgtgttgggtttttgttttgtggtgtgttgtaggggttggggagttatggttttgttttgggtgggttttaattagtttgttagttggggaagggtaagggttttttttattttttttttattgtggttgggagaattgtggtttagtttgtttttgggttggggtgttggattttg

SEQ ID NO: 862 - DNA, 2452 bp, Artificial Sequence
  chemically treated genomic DNA (Homo sapiens)
tggagtttagtgttttgatttgaggataggttgggttgtgatttttttggttgtggtgggaaagaggtagaggagatttttgtttttttttgattgataggttggttagagtttgtttagagtagggttgtgattttttgatttttatagtgtgttgtggagtggggatttgatgtggtgttttggatttttagtgtttggtttttttgggaataaattgttttagttaaataggttattgtgttgatgggaggatggagattgtgaaggggtaggggagagggtttttggagttttgttgtattttattttgggtggggttttgattttatatagtttgttttttggggtttttttgttatagtgagttatttttttgttagtttttaggggatgggttttggtatatttttaagggttaggaaatagtttgtgttgattttagtgtttagttaggtggtggatatagtggtgtaaaggatttgaatttgggatttgggttagggtggtgtagattggattttagagttatttgggattgattttagatgaatttattttattttgttttttttgttttttttgggtttttttagggatatggattttatttttatgttgtgagtaaattgtgtttggggtttggagttaattgtagttaaaggtgagtttttagaatggttttgtttatgtttttttttgttttagttgggtttttaggggtggggagtgtgattagggatttttgtatttgtaattttgttttttgttttggggtttttggtatattttgatttttgttatttgtgtatttagagatattgtgtgtgtaagttgagtgtgtattgatttatgtttgttatttatttgttgtagaaatatttgtgaatgtagtatatatttgtgaatatgtatttttgtggatatgtagggatatatgtgggtatgtttggtttggttttgggttgttggtttggggttttttgttgtttgttgttgtttttttattttttttgagtgttttggtgttttggtgaatttgtgtttagttttggttttataaggaattgattttggtagttgtttatattttagttggtgtagtttagtgtggttttgatatataattgttttgtttgggtttgttttaaggaggtgggatttgtgtttggtttattgtgttgtttgggattgttttttttggggtttaggtttttggttgtttagtgttgagttagttgagtttggttgagttttagtaggttagttggttttggaattttgtgtgttgtaggagggtatttttttttttttttagttttttgtttgtgttggtgtgttggatatatttttttatgaagtgagttataaatttggttttttttatttggagaatgagttggtattttttaggaggatatagtattgttagaatgagttttttttttggtttattgttgatttattttggtaggtaaggatttatttaatgtagttgaaaagattaggaggatgatattaatatataaaaatttataaattataaaaatgatgtatttttttgtaatttttagaaaagttttataatattatttttatttttattgattttttattaggttattttttttagaagtatttggagtatttagatattttaataaagtattttgaggttagaatgattttttagttttgtttattttatagatgaggaaattgaggtttattgaatttaagtatataaagttgttgattgttatatgtttttgggaaggagggaattggagagattattaaaaaagggtaatttgatttttagggaaatagaagaattggatattgaattaatttttttatattttatatttatttgaatagaagaaatttttgtggttgtagtagttttgttggttaggaaggggaggatttgatgagtgagttgtttgttttttgaatattttttatatagtttgtatatattgttggggaaattggggtttagagaagtttggtgatttaatttagattatgtagtaaagaaatgattatagttggaatataggatttttgttttttgtttggggttttttgtttgttattttttatttttgtggttttaaaatgataaaaatgttaaataatttttatttgtagatggtttatggagatgatataaataaaggataattttggaagtgtttattggtttttttgatagatatagaaatgagtgatgtgtttatttgtttttatttattttatatttttgattttttttggattttatttttgttttttttttgtgtttgaaatatttgtagttttgtttttaaaaaattgtagaggatggattgtttatttgaatagaaattttattaaaaaatagaatttaggtttggagtagttataattattgatattttaggttgtttagagtttggaaattttt

SEQ ID NO: 863 - DNA, 2353 bp, Artificial Sequence
  chemically treated genomic DNA (Homo sapiens)
tatagttggataatagaatttttaagaagtatttttttatatttttttatttatgattttttttttatttgttttattgatgtttaaaattttgtttttggagtttatttagtttatgattttgattttggttaatattaaaatatttaggatatgggggaggggaagttgttattaattttagtttagttagttaatatagtgagttgtttttatttattatttaataagtatttattgattgtatattgtatattaggtttgtattaagttttggtgttataaaaatgaatgaagtttggtatttatttttaatattgttgtagttatatataggagaatgtaagagattattatgaaataatgtagtaaatgtataatagggaattttagataagtatagtagagaagtaattagttttgttttaggtttttttttgagattgatttggttggaagggagtaggttttgttaaatgaagaagttgtgggaagataggaggataagaataggttttatgaagagattttagagtagagttgtgtatttttttttttttttgttttttttgttttgttatttaggttgaagtatagtggttagtttatggtttattgtagttttgattttttaggtttaagtgatttttttgttttagttttttaagtaattgggattataggtatgtattattatattaggttattgttttatattttttgtagagatggggttttattatgttgtttaggttggttttaaatttttgggtttaagtaatttgtttatgttaatttttttaaatgttgggattataggtgtgagttattgtgttaggtttgagtaattttaattataggattttaaaaagaaattttttgtgttatttattaaataatattttttattaatttggtagtaaatattttgttaatagtatttaatttttaggtaggtattgtgtttatatatatatttatttttttttttttgattgtttttttgtttaatgggtagttattttttttggtatttagtagaatgagttgttgtagtttatataaaaagaatggagattagagtattttttgtgttattaatgtgtttgagaaatttgtagtgttattattattatatattatttttattttattgaatattttattttttggttttgtgtgggttgagaggattgttgtatgtatgtttgtatgtatgtatgtaatttatagtttttttttgtttgaatatgttggaggttttttggaagttgtgtagataatagtaattttagtttgaattattttttttaattgtggataagttgttaagaggtttgagtaggagaggagtgttgttgaggtggggtggggtggggtgtggagttgggttggtagtgggtgtggtggtgttgtttaggtgagttattgttgtttttgtttagatatggttgtttttatatttaggtttttgtgttttttgtttgtttgttttttttttatgtattttttaggataattgtgattttaggtaagtaaggtggggtagtagggttggtgattttttttttttagggaaatttataaatattgttatttgagttgatttgagatggtgaataaaatggatttaggtttattttggggttgtttttaaagatgggttgttgggttgagtattgttgttttttattttttatgttggtagtatttttagtttttaattttttgagtattaggaatattgtagagggagtaaaattatttaattatataaggtaagaatatgaagaagttatgtggtttggaggttttggtggtagaggggtgtaattgtgatttatggaggagaaaatatttttgaggatatttttaggtttattttggaatttagaatgaattttgtaatgttagttttagaaagggtgtggtatttgtaaattggggaaagttgagaagtattggtgggtttggttggtttttttttttggttgatgttgtaaggttgagatttaggtatatggattgtttttttttttggtatttttaagtattagattgttgtttatttatttgtaattgtatttttttaagtggaaattattttttttttagttttttgggttttagtataattttaaataagttatatattttagatgtatatttttggatttataaattgtaatagttgtttgtagttttttatttatatgttgtatatttttttttatggttttatttaagtatattatattaaaaattaatatgttaggttattttagagatttgtaattagatttttagagttgggggtttttagatatattttagtttagtttttttattttgt

SEQ ID NO: 864 - DNA, 2353 bp, Artificial Sequence
  chemically treated genomic DNA (Homo sapiens)
atagaatgagggggttgggttgaaatatgtttaagagtttttagttttgaggatttggttataagtttttggaatagtttggtatgttggtttttagtatgatatgtttaaatgaagttataagaaaaagtgtatagtatatgagtaagaaattataagtagttattataatttataagtttaagaatatgtatttgaaatgtgtaatttgtttaaagttatgttgaaatttagaaaattgaagggagaataatttttgtttagaagaatgtagttgtaagtagatgaatagtgatttgatgtttaaaaatgttaaaaagaagggtagtttatatgtttaaattttagttttataatgttagttagggagaagagttagttagatttattaatattttttaattttttttagtttgtgggtattatattttttttgaaattagtattgtaaaatttattttgagttttaaagtaggtttgaaaatgtttttagaagtatttttttttttgtgaattatggttgtatttttttattattaaaatttttgagttatgtgatttttttatatttttattttgtatggttaagtgattttattttttttgtagtgtttttggtgtttaaagggttgggagttggaaatattgttaatatgggggatgagaggtgatagtatttaatttaatagtttgtttttgaaaatagttttaaaatggatttaagtttattttgtttattattttaaattagtttaaataatgatatttatgaatttttttgaaaaaaggaagttattagttttgttattttattttgtttatttggagttatagttattttggaaaatgtgtggaaaaggaataggtaagtgaggagtataaagatttggatgtggaggtgattgtgtttgggtagaagtagtggtggtttatttgggtagtattgttatgtttattgttagtttagttttatgttttgttttgttttgttttggtggtattttttttttatttaagttttttggtagtttgtttataattgaaagaaatgatttaggttgaagttattgttgtttgtatagtttttaaaaggtttttaatatgtttgggtaggaaggggttgtgagttatatgtatatgtatagatatgtgtatggtaatttttttggtttatgtaggattggaaggtgaaatatttgatgaaataaaagtaatgtgtgatgatagtaatattataaattttttagatatgttggtggtataaaaagtattttgatttttattttttttgtgtaaattgtagtagtttattttgttagatgttaagagaggtagttgtttattaaatagaaagataattaaaaaagaaggaatggatatatgtataaatatagtgtttatttaaaaattaggtattattagtaaaatatttattattaaattggtaggagatattgtttaatgggtggtgtaggaagtttttttttaaaattttgtgattaggattatttaggtttggtgtggtggtttatgtttgtaattttagtatttggggaggttgatgtgagtggattgtttgagtttaggagtttgagattaatttgggtaatatggtgagattttatttttataaaaaatgtaaaataatagtttagtgtggtgatgtatgtttgtggttttagttatttggaaagttgagatgagaggattatttgagtttgggaggttaaagttgtagtgagttgtgagttaattattgtattttagtttgggtgatagagtaaaagaaataaaaagaaaaaggagtatgtagttttgttttgaaatttttttgtggagtttgtttttgtttttttgtttttttatagtttttttatttggtgggatttatttttttttagttgaattagttttaggaaaggatttgaaatggagttggttgtttttttgttgtgtttatttagaattttttattgtatatttattatattgttttataataattttttatatttttttatatgtgattataataatgttaaaggtaagtgttaaattttatttatttttataatattaaagtttggtatagatttgatgtatagtatgtagttaataagtgtttgttgagtaatgaataagagtaatttgttatattaattgattaaattaagattgataatagtttttttttttttatgttttgggtattttaatgttaattagaattaaagttataaattaagtgaattttaaaaatagaattttaggtattagtggagtaagtggagggaaggttataggtgaggaggtgtggaaggatgttttttaaaaattttattatttagttgta

SEQ ID NO: 865 - DNA, 2489 bp, Artificial Sequence
  chemically treated genomic DNA (Homo sapiens)
ttagatagagagtagtttgagttaggtaggaaagtgggatagttggggagttggattttattttttgtgagttttgttggtatttgatggtatgtggtttggagagggtaggtgatttggtgtggagggttagagggtaaatttttaaataagtggtaataggttattaatttgaaagggaaaattgtgtagtgatgggaaatgtgtttaataaatttattgggtgattaattataaaggttgggttggagttttagaggttgtttgttaaatattttattaagtggtattttgaaagttgttatttgtgtattttgggagtttagaggggattttgagggggaatgaggtttggaggatggaattatttttaggtagattgagaaggagtttggattttatttttaaatatagtttggagtttataggttagaggttttaatgggagaaaagttaaaggaagagggtgtagaaaggagttttagggaattggtggttatgtgattttgagtaaattttatttttttttgagatttagtgtttttatttttatggttttgtgtgtgttatagagatatggtggggattaaatttgattgtgaatatgaaagtgtttgggaaattttatggttttatttaaatatgagttatttttatttgaattaaggggggaagttatttggtaggattaggaattttatttttttgaatttttatgggttttgttgaggttgaagtagttaggggttaaagttgtttttagtttttggaagggtattgtgaaagtggatttgatttgagaagttgttttttgatgtgggtagttatgtgatgttagttttgaataagagggggtagtttggagtttggaaaggtgttagtgtaggtggggtttatgtttagattttttttgttgattgttttgatgatttatttttatattttagtttttttatttttattgtagagttggaaagggtgtggggaagagaggagagggaggtaggttttgggttttggttttgttttttgtttttttttatttttttttgggtttggttatttagttaaaaggtaggttaagagtaggagagatatagagtttggtattggttttaggtagtagttagtttgttgtttgtttgtgtgtttttagagttatggagagagttagtttgatttagaaggttaagttggtagagtaggttgaatgttatgaggatatggtagtttttatgaaaggtgttgtggagaagggtgaggagtttttttgtgaagagtgaaatttgtttttagtagtttataagaatgtggtgggtggttagagggttgtttggagggtgttgtttagtattgagtagaaaagtaatgaggagggtttggaggagaaggggtttgaggtgtgtgagtattgggagaaggtggagattgagttttagggtgtgtgtgatattgtgttgggtttgttggatagttattttattaaggaggttggggatgttgagagttgggttttttatttgaagatgaagggtgattattattgttatttggttgaggtggttattggtgatgataagaagtgtattattgatttagtttggttagtttattaggaggttatggatattagtaagaaggagatgttgtttattaattttatttgtttgggtttggttttgaatttttttgttttttattatgagattgttaatagttttgaggaggttatttttttggttaagattatttttgatgaggttatggttgatttgtatatttttagtgaggatttttataaagatagtatttttattatgtagttgttgtgagataatttgatattgtggatggttgataatgttggggaagaggggggtgaggttttttaggagttttagagttgagtgttgtttgttattgttttgttttgttttttttagttttttattttgttgagaggattagtatggggtgggaggttttattttttttttttaggtgttgtttttgttttaaagggttttgtggagagggattggtagagttgaggttatttggggttggggattttattttttttgtagttgttgagtgtatttaattattggttatgtttttatttttgttttttgtatttgtttttttttgattttaggattaggttattttttttttttttttgttttttttttgtttttgttgtttttgattgtaggaattgaggagtgttttgttttgtggttgagaattggatagtggtaggggttggagatgggtgtgtgtgtgtgtgtgtgtgtgtgtgtgtgtgtgtgtgtgtgttagtgtaagattgagattgagggaaagtatgtttgttgggtgtgattatgtttttttttaataaagtttttttgtgatattttttttgttttttttttagtttttggtgatgggttgggagtgggattggaatttgatttagagattttgattttggatttttgagt

SEQ ID NO: 866 - DNA, 2489 bp, Artificial Sequence
  chemically treated genomic DNA (Homo sapiens)
atttagaggtttaaagttagggtttttaagttagattttagttttatttttagtttattgttaagaattggaagagagataggaggagtgttataggggaattttattgagaggaaatatggttatatttagtagatatgtttttttttaattttggttttgtattggtgtgtgtgtatatatatatatatatatatatatatatatatatttatttttagtttttgttattgtttagtttttagttataaggtgggatattttttaatttttatgattagaggtagtaggggtaggagggaggtaagaggaggggagaagtagtttggttttggggttgggaggaagtgggtgtggagagtaggggtgggggtatgattagtggttaggtgtgtttaatagttgtaagaagagtgggatttttagttttaggtggttttagttttgttagtttttttttatggagttttttggagtaagaatagtgtttaggggagaagggtggggttttttattttatattagtttttttggtagggtgggggattggagggggtagggtggggtggtggtgggtaatatttagttttggggtttttggggagttttgttttttttttttttggtgttgttggttgtttatagtgttaggttgttttgtagtagttgtatgatgagggtgttgtttttgtaggagtttttgttgagggtgtgtagattagttatggttttgttgaaagtggttttggttagagagatggtttttttggggttgttggtgattttgtagtggaagatggaaaagtttagggttaggtttaggtggatggggttggtgggtggtattttttttttgttgatgtttatggttttttggtaggttgattgggttgagttaatgatgtgttttttgttgttattggtggttattttggttaggtagtggtagtagttattttttatttttaggtagaagatttggtttttggtgtttttggtttttttgatgaggtggttgtttagtaggtttagtatggtgttgtatatgttttggagtttagtttttatttttttttggtatttatgtattttgggtttttttttttttgagttttttttgttgtttttttgtttaatattggatagtattttttaggtagttttttggttgtttattatgtttttataggttattgagagtaggttttgttttttgtaggagagttttttgtttttttttatggtgttttttatgaaggttgttatgtttttatagtgtttggtttgttttgttagtttggttttttggattagattggttttttttatggttttggggatatataggtgggtggtgggttaattgttgtttgggattaatgttggattttgtgttttttttgtttttggtttgttttttggttgggtggttaggtttagagaagggtggggaggagtagggggtgggattagggtttaagatttgtttttttttttttttttttttatattttttttggttttgtagtaaaggtaaaaaggttgggatgtgggggtgaattattagaatagttagtaggagaaatttgggtgtgggttttatttgtattggtatttttttaggttttaggttgtttttttttgtttggggttggtattatatggttgtttatattaggaaatggttttttaaattagatttatttttatagtgtttttttaggggttaaggatggttttagtttttggttgttttagttttgatagagtttataaaggtttaggaggatggggtttttaattttgttaggtaatttttttttttggtttaggtgaggataatttatgtttaggtagggttatggagttttttaagtatttttatatttatgattgaatttaatttttattatgtttttgtgatatatataggattatagagatgggaatattaagttttagagaggggtgagatttgtttaaagttatatagttattaattttttgaaatttttttttgtattttttttttttagttttttttttattgaggtttttgatttatgagttttagattgtgtttggaagtgagatttaggtttttttttagtttatttgaagatggttttattttttaggttttatttttttttagggttttttttgagtttttagaatgtgtaggtggtagtttttagagtgttgtttaatgaagtgtttaataagtagtttttgaagttttagtttagtttttgtaattagttatttagtaggtttgttggatatattttttattattatataatttttttttttaagttggtggtttgttgttatttgtttgaggatttattttttggttttttatgttaggttatttgttttttttaagttatatgttattaggtattagtggggtttatagagggtggggtttagttttttggttgttttatttttttgtttgatttagattgttttttgtttga

SEQ ID NO: 867 - DNA, 2407 bp, Artificial Sequence
  chemically treated genomic DNA (Homo sapiens)
ttatttatttttttaatatatattaattgttgtttttatgttttaggttttgtgttagatgttagaaatatatttttatttattggattttggtatggtttattgtttagtgttttgttatgttatgtgttatataatgtatttattttggtatttagtttatggaaaataatgttgaaagatattgtatgtatgtttttataataaaattatgtaatttatgttttttttattgttttggttattaggaagtttttatttaaattagagtaaatatattagaatttgggtttgttattttagtttgttgaatttttttttttggtttagattttttattttggtttataaattttattgtataaatgttttttattgtaaaatattttaaattttttttaagggaaggttgtatggaaatgatatagtaaggttttttttgtatttttttagatttttattagggaaggtagatttagatgttttttttatttttagttttaaagttttttatttataaaattttttaagtagtgattattgttgttttgagtatttggaggtagtttagagtttttgaaaggtaatatttatatataaaaagaagttttttttgatttagattttagttttggtgttagatgtatatttgaggagtaggtggttagttagatttttatttgagtagttaataaaatttattgttttttaatggaattttttttgtaagtttgaattgatttgttatttttgtgatttgtgagatggtagggaagtattaaatattattatgatttgggttatagtggggggaaaaaaggaaaaaagaaaaaaaaaatttattgttaagttttgttaggtgtagaaagggttggaattgttggggttattttatttgatttattggaaatagagtggattttattaatattttaataaagagaatttttttgtattaggttggaagtggttgttagttttttgtgtaattttattttttggaaaagtggaattagttggtattgtttagtgtgatttgtgaggttgagttttaatagtttaaagaagtaaatgggatgttatttttgtggggtttgttttttgtgaggtgtttattttgtatttgttatgtaaaatgagggagtgttaggaaggaatttgttttgtaaagttattggttttggttattagtttttatttaatgtttttgtgatgttgttgttgatttatttgggaagttggttggttggtgaggtagagtttttttttaaagtttggtttttatggaaaatatgtttagtgtagttgtgtgtatgaatgaaaatgttgttgggtgtttttagttggataaaatgtagttgagaattttgtttgttttgtgtgtttttttgttttaggtagggaagaggggttgttgggtgtgttttgtgttttgtttttgtatttggattgtttggtatgggtagggtgagggggtttttggggggttggggtttttggttgtggtggtgaagatagattggggtttggtagggaggttattttgagtttagagattttaggtattttttatatataggtttttattttggtgtgtgtgtgtgtgtgtgtgtgtgtgtgtgtgtgtgtgtgtgtgtgtgtatgtttgttaatgggaggaggagagagtttttagtttttttttgttagtaggggtgatatttttgtttatattaagtggggtaattttggtttttttttttggaggtttggtgtattggagaaagatttagttagaggtgattttaatgagttgtggttttttttagtttaatgtttagtggttgaagtgttgtttgggtttggattgtgggatgtggggttggagaggttgagtaggtattattgattttttagggtgtttgggttttttggtatagtttggttgtttgttggaaggtgttttggggtagtagagagttttagtttggttgttgttgttgtttaaaggtgttggtgttggttgtatttgtattggggtttttttgtttttagattttgggtttgaaagggttggagtgtgttttttgttagggtgtaggttttagttttttgtatttttattgtttagttagttggagttttggttagattttgggttgttgtttttgttgttttttttgagtgggagtggagtgtagagaaaagtttaagttttgtttatttgggttgtagttgtttgttaatttttagagtgttatggtgtgagggaagggtatgttaattaggagagggggtgagggagatgtggtttgtttgtagttatttttgtattttagagattttgggaagtttgagtgtaggaaagtagtgttttgaggttaggtttggggtgttggttgttgtggggggtatgttttgtgttgtt

SEQ ID NO: 868 - DNA, 2407 bp, Artificial Sequence
  chemically treated genomic DNA (Homo sapiens)
agtagtgtagggtgtgttttttgtagtggttagtattttaggtttggttttggagtgttgtttttttgtatttaaattttttgaaatttttgaggtgtagaggtgattgtaggtggattgtattttttttgtttttttttttggttggtgtgttttttttttgtgttgtggtgttttgagggttaataagtagttgtagtttgggtgggtaaggtttgaatttttttttgtgttttgtttttgtttagggaaggtagtagaggtggtagtttgggatttggttggagttttagttggttggataataggggtgtggggggttggggtttgtgttttggtgggggatatgttttggtttttttgggtttggggtttgggagtaaaaggattttgatgtgggtgtggttggtgttggtgtttttgagtgatagtagtagttgggttgaggttttttgttgttttgaggtgttttttagtgggtagttgggttgtattagggggtttgggtgttttgggaagttggtggtgtttgtttggtttttttagttttgtattttgtaatttggatttgagtagtgttttggttgttgggtgttgggttggggaaaattgtggtttgttggagttgtttttaattgagtttttttttaatgtattgagtttttggaggagggaattaaagttattttatttgatgtgggtgagaatgttgtttttgttagtaaaaaaggattgggagtttttttttttttttgttaatgaatgtatatatatatatatatatatatatatatatatatatatatatatgtatgttagagtgggagtttgtgtgtggggggtgtttaggatttttgggtttggaatgatttttttattgagttttgatttgtttttgttgttgtgattggaggttttgattttttgaaagtttttttattttgtttgtgttgggtgatttgaatgtagaaatggggtgtagagtgtgtttggtagttttttttttttatttgggataggagaatgtatagaatgagtggagtttttggttgtattttgtttgattagaagtgtttggtggtgtttttatttatgtatgtggttgtattgagtatattttttgtgggagttaggttttgaggagaggttttgttttgttagttagttaattttttaaatagattagtagtagtattatgaaagtattgggtagaggttgatgattaggattaatggttttataagatggatttttttttaatgtttttttgttttgtatggtagatatggggtgagtattttgtgaggagtgagttttgtggaggtggtattttatttgtttttttggattgttggggtttagttttataaattatgttgggtaatgttagttgattttatttttttagagaatggaattgtatgggggattggtggttatttttagtttagtgtaaaaagattttttttattaaaatgttaataagatttattttatttttaataaattagataaaatggttttagtagttttagttttttttatgtttggtaaggtttggtagtggatttttttttttttttttttttttttttttttattgtggtttaagttatgatggtgtttggtgtttttttgttattttataaattataaagatgatagattaatttgagtttgtagaaaaaattttattaaggggtaatagattttattaattgtttaggtgagagtttgattagttatttattttttaaatgtgtatttggtattaaagttgggatttggattggaaggaatttttttttgtatatggatgttattttttagaagttttgaattatttttaggtatttagaatagtagtagttattgtttaagggattttataaatggggggttttgggattgagggtaagagggatatttaggtttgttttttttaataggaatttaagaaaatgtagggaagattttattgtattatttttatgtagtttttttttagaaagaatttaaggtgttttataataaaggatatttgtgtaatagaatttatgaattaaaatagaaaatttgggttagaaggaaaagtttagtaaattgaaatgataagtttaaattttaatgtatttgttttgatttggataagagttttttgatagttaaagtaataaaagaaatataagttatatagttttgttgtagaaatatgtatataatgttttttagtattattttttatgggttaaatattggaataaatgtattatgtaatatgtaatatagtaggatattgagtaatggattatgttaagatttagtggatggggatgtatttttagtatttggtatagggtttggaatatggagatagtaattagtgtgtgttaaagaaatagatgg

SEQ ID NO: 869 - DNA, 2436 bp, Artificial Sequence
  chemically treated genomic DNA (Homo sapiens)
gtgaatttttatttttattaaaaatataaaaattagttgggggtggtggtgggtgtttgtagttttagttatttgggaggttgaggtaggagaattatttgaatttaggaggtggaggttgtagtgagttaagattgtattattgtattgttgtttgggtaatgtattgagattttgttttaaaaaaaaaaaaaaaatgagagaataggggagggtttagggtttagagttttggagaatagattttagtagtattaatattttaggattaatgttataaagatatgggttataattaaattggagaatatggttaaggatgggaatttagtttgagtagggttgagttgagtagggttaagttaagtagggttgagttagaatattttttttttttttttgaataatttatttatattttagttatagggttggttttatttagtttggtgggagggaggagagggttggtttgtgattttagtgttgaggtttgattaaggtaaagggaaattttttatttttagattttttgtaagaaagaatggtatattatttgttattgataggggttattattattaaatggagttagtataaatgttttttaataaagtatgtttagtgtttgggttttagtttgtatgtttatgaattgtttgttatattttttttttgaatggttggaaattgggtatttgtttttttaaataggaaatattttttgtttgagtgagttatttttgttttgttttaggagtaaagtttattttgtagttttttttgtggtgaagtttttttttttttttggagattagattttgtttttttgttggagggaagtgtttttataggtttttttttttttattttttgtgtttttttttaagttttgttgaatttgttagttaatttaataggaagtgaggttatggagggaggtagaagagttagggtggttattgaaagtaaaagaaatttttttttgggagttttttttatttttttttttgttgagtatgtggagttaggtaggttaggggatttggagattgtgatggtgttaggaaagggtggagtgggtgagtgtttgttgttaaggtggtttttttaataggaaattataatatttttgttttttgatttgttttagaaatagggttgtgggggtggggaagtaatttggatttgtttttttgaggatatttttgggtgttgtttggtttaggttttttgtgtggtttttttttgagttgttgtttttgattttgttatttttttattttgagtagtttttagtttttttgttatttttttgttttttaagtttttttgttgttttgaatgtagatatatggttttttttttgtggatttgtttggagagtttagaagattttattaatttattttttttttttttttatttggttttggggttgatggttaagtattttattttgttattttgttgaattatgatgttttgaggtgtatagtttttttttttttttttgtgtttgaagggtttttttttatttttttatttttatttttgtttttttgtttttttttttgttttttaaagatagttttttaatgttttgatgtggatttgtgaatttatttgtatttttgtaaaatgtattttttttttgtatgtgtatattgttttttaattatgtgattttaggtaagtaatttttttgtgtttttgttattttattattaaatgattaataatgtttttagaggtgattgtgaggtttgaaggagataatatgtatatattatttattatatgagttagtaattattattgtatattaatattattggtattttattttgtttattttgtttttattttttttttatttatttattttttgagataaagttttgttttgttatttaggttgtagtgtagtggtgtaattatggtttattgtagttttaatattttgggattaagtaatttttttattttagtttttagattagttgggattataggtgtgtgttattatatttggttaattaaaaaatttttttttatagagatggtgttttattttgttgtttaggttggttttaaatttttatgtttaagggatttttttattttggttttttaaagtgttaggattatatgtatgagttatggtggttatttaggtattgatattatgaggttattttgatttagttttttttggtgaagagttttttttagatattttgtttagtttttttagttatgagtttttattttttgaaagtttatattttatttggggaaagataaaaggtagttttaaagaagagaggtgtttgattttttttttttatttttaatattagaaaatattttatttaatttttagtatgaaggtaatattttgtttattggtatatttttagagtttaatatggt

SEQ ID NO: 870 - DNA, 2436 bp, Artificial Sequence
  chemically treated genomic DNA (Homo sapiens)
attatgttgggttttagggatatattagtaaataaaatattgtttttatattgagagttagatgaaatgttttttgatattaaaagtaggaaaagaaaattaaatattttttttttttgaaattgttttttgtttttttttaaatagaatataagtttttagagggtagggatttatagttgagaagattgaatgaagtatttgaaaaggattttttattagagagggttaggttaagatggttttataatattaatgtttggatggttattgtggtttatgtatgtaattttagtattttgagaggttaaggtgggaggattttttgagtataggagtttgagattagtttgggtaataaaatgagatattatttttatgaagaaaaattttttaattagttaggtgtggtagtatgtgtttgtggttttagttaatttgaaggttgagatgggaaaattgtttgattttaggatgttgaggttgtagtgagttgtgattgtattattgtattgtagtttgggtgatagagtaagattttgttttaaaaaataaataaataaaaaagaaatagaaatagaatgagtaaaataaaatattaatagtattaatatgtaataataattgttaatttgtgtagtaagtgatgtatgtgtattattttttttaagttttatagttatttttggaggtattattaattatttaatgatgagataatagaggtatagaggaattatttgtttgagattgtatagttaaaaaatagtgtatatatataaaagaaaaatatattttgtaaagatatagataaatttatgaatttatattaaaatattagagaattgtttttggggaataagagagagggtaggagggtaagggtgggggtggagagataaaaggaaattttttagatatggaagagggggaaggggttgtgtattttagggtattgtgatttgatagaatgatagaataaagtatttaattgttggttttagggttaaatgaaaaagaaaaaaaagtggattgataaagttttttggattttttaaatgggtttataggagggagattgtgtatttgtatttgaggtggtagggaagtttggaggataaaaaggtagtagaggaattggagattgtttagagtgaaaaagtagtaaagttagaggtaatggtttagagagaaattatataggagatttgggttaggtagtatttagaggtgtttttagaagggtagatttaagttgtttttttatttttatagttttgtttttagagtaagttaagaaataaaaatattgtggttttttgttgaagaggttattttggtaataggtatttatttgttttatttttttttggtattattgtagtttttgagttttttaatttgtttaattttatgtgtttagtagggaagggggtgggaaaggtttttaggaagaagttttttttatttttaataattattttggtttttttgtttttttttatggttttattttttgttgagttgattagtaaatttagtagggtttgaaaaaaaatataaaagataaaaggaggagaatttgtgaaaatatttttttttagtagaaaggtagaatttggtttttgagagaaagagaaaattttattatagaaggaattgtagggtaaattttatttttaaagtagaatagagatgatttatttgaataagaaatgttttttgtttaaaggaatagatgtttaatttttaattatttagaagagggatgtggtagataatttatggatgtgtaaattaaagtttgagtgttggatatgttttattggaaagtatttatattgattttatttagtaataataatttttgttggtggtaagtaatatgttatttttttttgtaaagggtttgggaataggaagtttttttttgttttgattaaattttagtattgaagttatagattagttttttttttttttttgttggattgggtaaagttagttttgtagttgaaatgtaggtagattgtttagaaaaaaggaggaagtgttttggtttagttttatttggtttagttttgtttggtttagttttgtttaggttgagtttttatttttggttatgttttttagtttagttgtaatttgtgtttttgtagtattgattttggagtgttggtgttattgaggtttgttttttaaagttttgagttttagatttttttttgtttttttattttttttttttttttgagatggagttttggtgtgttgtttaggtaatagtatagtggtgtgattttgatttattgtaatttttattttttgagtttaggtgatttttttgttttagttttttgagtagttgggattataggtatttattattatttttggttaatttttgtatttttaatagagatggggatttat

SEQ ID NO: 871 - DNA, 2481 bp, Artificial Sequence
  chemically treated genomic DNA (Homo sapiens)
atatgattagttttattttagaggtgaggagtttaaggtttagagaagtggggggatttggttaatgatatatagttagtgtatggggaagttaggattgaaagttggtttgatttagagttgggttgggtgttttttaagaaaggagatttttggtttggtttttttaaaattatttttaggatgggaatggtggtttatatttgtaattttagtattttgagaggttaaggtaggaggattgtttgagtttaggagtttaagatttgtttggttaatatagtgagatttatatttttattaaataaaaataaaaataaaaataaaatataattagttgggtgtgatggtatgtatttgtagttttagttattagggaggttgaggtggggaggtgggaggattatgtgagtttgggaggttggattattgagattgtagtgagttgtgattgggttattgtattttagtttgggtgatgatagatttagattttgttttaaaagataaaaattaaattaaaaaaattattttgattgttttattttgggagttagatgtggatttgaattttagttgtatttttattggtagtgtgttttgggtaagtttttgtttttttgtttataaggtgagggttaaaattttttattttgggagttttaagagaatttagttggaaggtagtttagttgaaggttaggtattggttaaattttaggggaatttgatttaagttatttttttttttttttttttttttttgaggaaagttttattttttgttttttttgtttttagaaagaaagagaaagaggaggggtgagtagggaagatttgggttttttgattttttagtatttattattgttttagagggttggttttttttttgatagagttaaggtgggaaagagaggttaagagttagggaggttgggggtttttttgggttttagataagggtatattttagaaaatgattatgttggttttttttagtgtattgtttttattttgtttttatgtttttatttatttgtttttgattggagtaatttaagatagagtagaatggttatagtttttagttgtttaggttttaggatttttttttgggttatggtttaggataagggtttttggggtagattttaggtatgtaaggtaggaagttttggggtggtgttgaaggtaggatttagatgttggtttagagggaaggattttagaatttgggttggaaaggggtagtaagtgtttaaggttggtttttaaggtagggagtggttgtaatgggagatgtttggagtatttgaagtgagtagtgtggatgagttattagtattgtttggttatgtagggtttttttaggagtggttgtatttatttgtttgttttttttttggttttgtttattggttgggttttgttagttttttttgttattaaagttatgagtttttttagagttgtaggtttgtgtgtgtgtatgtatgtgtttgtgtgtatgtgtgtgtatatgtataggttttttgtgtgtgtgttttggtgtgtagtgtgtatgtggtgtgtgtgtatgtttgtgtaggttgtgtgtgtttttttatgtggtgtggtatgtgtgtgtgtgtgtatgtataggttgtatgtgtatatgtgtaggttgtgtgtgtttttgtgtgtgtagtgtgtgtgtttgagtgtgtgtgtatgtatgtgtatgtggtttgtgtgtgtgtgtagtttttttggaatgtgatgatttttttttgttttaggttttttaggttattttaggttagttatgttttttagggtttggttttagtttttattatttggagttatagttatttttttttttttttttttttttttaggttggttatgggagtttaagatattatggtttgttttttgttaggttttttttgtgatgtttgtattttatgggtggtggtgagtttgtggagtagtattaattattttatagatattttttaagtgtttatgatgtttttaggtgtttaggataaaataggtattagttttgttttttttgagttttgagtttatggtgaagtaggggtgatatattttaattaaataattataaataggttggtaaggtggttagttggttttgggaggttgaggttggagtattatttgaagttaggagttttagattagtttggggaatatagtgaggttttatttttataaagaaatataaaaattaggtaggtattgtggtgtatgtttatggttttagttatttgggaggttgaggtaggaggattgtttgagtttaggagtttaatgaagtattgagttatgattatgttattgtattttagtttgggtaatagagggagattttgttttaaaaaaaaaaattgtaattatataataattttaagttaggaatagtgatgaaaaagaatggtgtgagtatattatagtttggtaaaggtt

SEQ ID NO: 872 - DNA, 2481 bp, Artificial Sequence
  chemically treated genomic DNA (Homo sapiens)
agtttttgttaggttgtggtgtgtttatgttatttttttttattattatttttagtttgaaattattgtgtaattgtaatttttttttttaagatagggtttttttttgttgtttaggttggagtgtagtggtgtgattatagtttaatgttttgttgaatttttgggtttaagtaatttttttgttttagttttttaaatagttggaattataggtatgtgttataatgtttgtttaatttttatatttttttgtagagatgaggttttgttatattttttaggttggtttggaatttttggttttaagtgatgttttagttttagttttttaaagttgattagttattttgttagtttgtttgtgattatttgattgaagtgtgttatttttattttattatgagtttagggtttaagggggatggggttggtgtttgttttgttttggatatttgggaatattataggtatttaggaaatgtttgtgggatgattggtgttgttttataagtttgttattatttatgaggtgtaggtattgtagaaagggtttggtaggggatagattatagtgttttaagtttttataattagtttaaggagggagggaagaagggaggagtggttgtggttttagataataaaagttggggttaggttttggggggtataattggtttgagataatttgaaagatttgaggtggaggagagttgttatattttagggagattgtatatatatataaattatatgtatgtgtatgtatgtatatttagatatatatattatatatatagggatatatatagtttatatatgtgtatatatagtttgtatatgtatatatatatatatattatattatataagaggatatatatagtttatataggtatatatatatattatatatatattatatattgggatatatatataaaaggtttatgtatgtgtatatatatatatatggatatatatatgtatatatatgggtttgtagttttgaaaggatttatgattttggtggtaagaggagttggtggagtttagttagtgggtggggttaggggaggggtgggtaggtaggtgtagttatttttgggaggattttgtgtggttagatggtgttggtgatttgtttatattgtttgttttggatattttaggtgttttttgttgtggttgttttttgttttagaggttagttttggatatttgttgtttttttttagtttggattttgggatttttttttttgagttaatatttgggttttgtttttgatattattttaaggttttttattttgtgtgtttggagtttgttttaggggtttttgttttgggttatggtttagaagggggttttggggtttgggtagttgggggttgtggttattttgttttattttggattattttggttggggataggtaagtgaggatgtgggggtagggtggggataatgtattggagggagttggtgtgattattttttggggtgtgtttttgtttggggtttaagaaaatttttggtttttttagtttttggttttttttttttattttggttttgttagggaaggggttagttttttggagtagtggtgggtattaaggggttagggaatttgagttttttttatttattttttttttttttttttttttttaggagtggaaggggtagaaggtgagattttttttggagagggaggaggggagggggaggtgatttggattggatttttttggggtttaattagtgtttggtttttagttgggttgttttttaattagatttttttagggtttttagagtggggggttttagtttttattttatgggtagagaagtagggatttgtttagggtatattgttagtgaaggtgtagttgggatttagatttatgtttgatttttaaagtggggtaattgaggtggtttttttggtttggtttttgttttttgaaatagggtttgggtttgttgttatttaggttggagtgtagtggtttgattgtagtttattgtagttttagtgatttagttttttgggtttatgtgatttttttatttttttattttagtttttttagtggttgggattataggtgtatgttattatatttagttagttgtgttttgtttttgtttttgtttttgtttggtagagatgtgggttttattatgttggttgggtaggttttgaatttttgggtttaagtgatttttttgttttggttttttaaagtgttgggattataggtgtgagttattgtttttattttggaggtggttttgagggaattaaattaagggtttttttttttggaaggtatttaatttagttttgagttagattggtttttaattttggtttttttatgtattggttgtgtgttattggttaagtttttttatttttttaagttttagattttttatttttaaaatgaagttggttatgt

SEQ ID NO: 873 - DNA, 2444 bp, Artificial Sequence
  chemically treated genomic DNA (Homo sapiens)
tagattttaggtgttttggagttttgtagattagagaggttagtattggaagtttgggtttatgtttttagtagtttttagtttagggggtttttaaggttgaatagtaagtttaggattattttggtggtggggtaggtttagtttatatttagttttggtaagtagttttagaaattgttagtgatgttgtttttaagttaaattttaggaggaaaagaaaatatgaggataataaagagaggaagtggtttgggttggtttatttggtgggttttgttttgttttttaattattttggttggttttataggggttgttaattatataagttagtttttgtttttgaggatttggtttagggattttgggaatgtggtagatatggggtggttttattaaatgtatttttatgggaatttgttttttgggagttatgaaaagagtgtggattttgaggtggggttataggaagtggttaggtttattttaggggatttgttgtttatttatattgttggttaggaaatggggggtaatttatgtttttttagtatttttagtattgggtggtttaaagaagggaagggattattttggggttatatagtatgtagttagaggttaaggtatgaggaagttttttatttttttatttttatttattttagattttttaattggttttatggtagtttagggtttagtggtatttaggatgttggtgggtagttgtatagtttaggttgtgggaggttggttgtttttatttaataggtttatgtggttttgatttttatttaggaagttggggataatggttaaggtgttttttttttttgtgtttgtttgtttaggtgtagtatagatatagtatttttggggttaagagtatttagttagggttgtttttatgggtgggtagggtagtaaatgaatgagggataggttgggaggtggttagttttttttagtttatggagggtatggggtaggagagttgggttgagttagtaggagtttagggagtttggtttttgtttttttattttggaggaaggtgaggttgaatttttttttttttttttttttttttttgtttttattgtatgtagggttggttgggttttagttggtttttgtattaatattttattggtgttaataggaggtattggggatagttgttgtggtagtatttgagttagtttaagtttgtagtttgtagggagatttagttttgttttgtttgtagtagtataattttgtatatttattatggatgtttttaagaagggtttttttattgttaaggagggtgtggtgggtgtggtggaaaagattaagtagggggtgatggaagtagttgagaagattaaggagggggttatgtatgtgggtaagtggggtatggtagggtgggatagtgtggtggttaaagggtgagtgtttagttatttttgttagattttattttttagttttagggaggtattttgggagggggtgaggttttggttattaaggtggggtttttagattttggagtatttataatgttttgtgtatatttatgtgtgtttgtttttggtttttttggggtttttgggtgttagagattgtagatagggttggttatttgtttgtgtatgtatatatatatttttaagtatattagttttttttgagtttggagtttttgaagttatgagtagtttgtgtttaggtggtttttattttttttatatgggagtggttatagttaggttatggattttttttttttttagagagaaggggtaggttgggggatgaaatttaggtttagtgtttttttttttgtatttttttttggtattttttagaggaggaaggggaggttaagttaatgatttagttttggtttattttgttttgttgttgtttttgaggtttggttatatttgggtaggggttggattttgggtttagttagtgtttttattttaggtttgtttttttttgttttttatattttgttttgttttttttttatttatttattttttttagatatagtaggaagaggttttttgaaggggttgttggtttttagatattatttttatttttttattgattttatagtttgtttagttgttttgttgtgtttgttttgattgtttttaatattttgagggaggtttgggttgatagttttattttttttttaggagttaagattaaggagaatgttgtatagagtgtgattttaggtgagaagttttagggttaggggatatatgggggataggatttttggggtttttgtattttagtgttggggtttaaatttagagttttgttttatttttaattggggttttaagttttatagatttttgtagattatgaggttaaattagggtgggtgtttttttatttttattagtattagaggtgtt

SEQ ID NO: 874 - DNA, 2444 bp, Artificial Sequence
  chemically treated genomic DNA (Homo sapiens)
ggtatttttgatgttggtgggggtaaggagatgtttattttagtttagttttatggtttgtaggggtttgtagggtttgggattttagttgggggtaaggtaggattttaggtttgagttttagtattaggatgtaggagttttaggggttttattttttatgtgttttttggttttggggttttttatttgaggttatgttttgtataatattttttttggttttggtttttggggaggaaatggagttgttagtttagattttttttgaggtgttgggggtggttaggataaatataatagaatagttggataaattgtggggttggtgggggggtaaggatggtgtttgggggttggtggtttttttagagggtttttttttgttgtgtttggaagaagtggatggatgggaaggggataggatagaatgtgggggataagagagagtaggtttgaggtagggatattggttagatttagggtttagtttttgtttgggtgtggttgggttttagaagtagtaataggataggatgggttagagttgagttattggtttgatttttttttttttttttggagagtgttaggagaggatgtgggggagggaatattgagtttaggttttattttttagtttgttttttttttttggggagggaggggatttgtgatttggttgtagttgtttttgtgtggagagggtgggggttatttgagtataggttgtttatggttttaggggttttaggtttaggggaggttggtatgtttgggaatgtgtgtgtgtgtgtatagataggtagttagttttgtttgtggtttttgatatttagaggttttgaggaggttaaagataaatatatataggtgtgtatagggtattgtgggtgttttagggtttggagattttattttgatagttagggttttgtttttttttaaaatgtttttttggggttggggagtaaggtttggtgaaggtaattgggtatttattttttggttattatattgttttattttgttatgttttatttatttatatatatgattttttttttggtttttttagttgtttttgttattttttgtttggttttttttattgtatttattatgttttttttggtgatggagaagttttttttgaagatatttatggtgggtgtgtagggttgtgttgttgtaggtaggatggagttggatttttttgtgagttgtgggtttgagttggtttgagtgttgttgtagtggttgtttttgatgttttttattgatgttgatgaaatattgatgtggaggttagttggagtttagttagttttgtgtgtagtgggggtggggagggagggagggagggaaggaggtttagttttatttttttttaggataggaaggtagagattaggttttttgggtttttgttggtttagtttagtttttttgttttgtgttttttatgggttggagggggttggttattttttaatttgttttttatttatttattgttttgtttatttatgggggtagttttggttgggtgtttttggttttaggggtgttgtgtttatgttgtatttggatagataggtatagagaggggaggtgttttggttattgtttttagttttttaggtaggggttagggttatataggtttgttaggtgagagtagttaattttttgtggtttgggttgtgtagttatttattagtattttggatgttgttggattttgggttgttatgaaattggttggaggatttgaggtgggtgggggtggggaaatgaaggatttttttatgttttggtttttggttgtatgttgtgtgattttagaatagtttttttttttttttgagttgtttagtgttgaaggtgttgaggaggtatgaattgttttttattttttggttagtagtgtggatgggtagtaggttttttgagatggatttgattattttttgtggttttattttgaagtttatgttttttttatggtttttagggagtaggtttttataaggatgtatttggtggggttattttatgtttattatatttttagagtttttgagttaagtttttagggataggaattggtttgtgtggttggtggtttttgtggggttagttagggtagttggggggtaggataagatttattgggtaggttggtttaggttattttttttttttgttgtttttgtatttttttttttttttgagatttaatttgaagataatgttattagtagtttttggagttatttgttaaggttgagtgtgagttgagtttgttttattattaagatgattttgagtttgttgtttagttttgggggttttttgggttgggggttgttgggggtatgggtttaggtttttagtattagtttttttgatttgtagagttttaggatatttggggtttg

SEQ ID NO: 875 - DNA, 2489 bp, Artificial Sequence
  chemically treated genomic DNA (Homo sapiens)
ggaagggttgaggttgtttttgaattattttttttttttatgttttatagtttttgggttttttatttttattttattttgtattttgtgttaagttggggagagaaggtgtgggtgtagttatttttggggatttttatttatatttagttgggtaggggagaaggggtttatagatgtttttagtttttttttttttagttttgagttttttttttatattttttttgttttggatgtaggaagtggggggaggttgttatggaaatgttttttttttttgtggttaaggttattggggtgtttttggagatttaggggttaattggttggtgtttatatttatttgtggggattagtgttgtggtggagaagagtaatagtagaagttggagttggagtttgggaggtgttgttgttgttgttgttgttgtatattgggatttgtttggtagtattatatttgttatgttgggtatttgttttagattggtggtgttggttgtttttggagtttgagtggatagttaatgagatgttaatgatatgtgttggaggtggagtttgggtagattaattatagtgttgtgagtttaatttggtttttggagggttttgtttttttttttattttgttttttggtgttggtgtttggtggtgtgtttgtgttatttaggggtggggttaaggggaggggtgtatgtaaatatgtttatgttaaaatttgggttttgttttttttggattaaggaaaaagtgtttttttgggtgtttggtgtgtaaggatttgggttttagggggtgggtttagttttttgtatatttttattaggaatgtttatagtaattgttgtattagattgatgattggagaattttttttaagagggttttttgttttgtatattgagtgtatttggtttagtgaattagatgttgtaaatttttgttatttattttgtattgaaggaatagatttttgggaatgggggttgtgtgggagtggagagtaagaaggtaggtttttggattgataaaataatttgggagaagtgtatgtgtgttttgtatgtttggtggagtgggagagtttgtttaatagtttagtggtagatttggggatagttggagaaggtagttgtagagttgggttttgagattttttagttggtttttttgtggtagaattttgggaaaggtagattgaggagggtatgtttaggtttttttgtttgttgagggttttttttttggttttaatatataggtgtgtgttgaatatatgtgtgaaatatttgtaatattagatatttaagattatataataatggaaaaaattagttaaggttttaggtgaagagtgggggtggtgggagttggggagagggagtgtggtgaaggtagggtttgttgtgttttttttttggggtttaaatttttttattttttttttgtgtttttagttttttttaaggaagttggggattaataggtgttttgagttttttttgtttttgggagagttttttttgttaaagtgatttgtatttttggatttattttttttttttgaaattttttttgttttttttttagttaggtagttggtttttttgtttgtttgttttttaattatttattttttttttttttagaagattgtgtgtgttttgattttttgttgtttaagtattaaattgaaggatgagttatattaagtgtaaaggtttataataatttaagtatttatagaatgtagaataataagatgtaggaaatataatttgtataataaatattaatattataatagttaaaataaattatgataaattatttgtggttaaatgattaagagattattgaatgtaaattgttaagtttgagttatagtttagaagagttgtgttaaatgatttttttagttttttgtttttattttgttataaaataaataaataatatatattaaaaaggaagttatgatttgttaatttattaaatgagttatatttaaaaatagttttttattatttattatgtataaattaattttgagattgtttggtttttatagttttggatattttgttttgtaattataggttttgatgtatgaattgtaggtagttttttagaagtggggaaagttttaataggagaatagtattataggagataggaaattattgttatgtgggtgttaggataatgtttagtttgtaaagttttatttgtttttattatttttggtagtgaggtatttgggttggattaaatagagagtaaagttttattaaaattggaataaaaaagttaaggttagttgggtatgttgattgatgtttgtaattttagtattttgggaggttgaggtagatggattatttgaggttaggagtttgagattaatttggttaatatggtgaaattttgtttttaataaaaatataaaaattagttaggtgtgatgatatatatttgtaat

SEQ ID NO: 876 - DNA, 2489 bp, Artificial Sequence
  chemically treated genomic DNA (Homo sapiens)
attataggtgtgtgttattatgtttggttaatttttgtatttttattagagatggagttttgttgtgttggttaggttgattttgaatttttgattttaggtgatttatttgttttaattttttaaagtgttgggattataggtattagttagtgtgtttggttggttttaatttttttattttaattttggtggaattttgttttttatttggtttgatttaggtattttattgttagaggtagtaagaatgggtaggattttgtagattgggtattattttggtatttatgtggtaatggttttttgttttttgtagtgttgtttttttgttggagttttttttatttttgaaggattgtttgtagtttatgtattggggtttgtaattatagagtagaatatttagggttgtgaagattgggtagttttgaaattagtttatgtataatggataataggaggttgtttttaagtgtaatttatttggtgggttggtagattatgattttttttttgatatgtattatttatttattttatagtaagatgaggatagaaggttggggaagttatttggtgtagtttttttagattatagtttagatttagtaatttatatttagtaattttttggttatttagttatagataatttgttatggtttgttttagttgttgtgatattgatatttattatgtaaattgtattttttatattttattgttttgtattttatgaatatttaaattattataaatttttatatttaatatggtttgttttttaatttgatgtttgagtaatagagggttagagtgtatatgattttttagaggggaagaaaataagtaattaaaaagtagataaataagagagttggttgtttggttgaaaagaaagtaaagagaattttggggagggagagtgagtttggagatgtaagttgttttagtaggagaggtttttttagagataggggaagtttggagtatttgttggtttttagtttttttaggaagggttgggggtgtagaggaggagtgagagggtttgagttttgaaggaggaatatggtagattttgtttttattatattttttttttttaatttttattatttttgttttttatttgaagttttgattaattttttttgttgttgtgtaattttaaatatttaatattataaatattttatatatatatttaatatatatttatatattaaaattagggaggagatttttgataagtggaggagtttgagtatattttttttgatttattttttttgagattttgttgtaaaaagattgattggaaaattttagaatttgattttatggttgttttttttaattatttttgagtttattgttaggttgttgagtgggtttttttgttttgttggatgtgtaaagtatgtatgtattttttttagattgttttgttaatttggggatttgtttttttattttttatttttgtatagtttttgtttttaaagatttatttttttggtgtaaggtgagtgatggaaatttgtaatgtttggtttgttaggttagatgtatttggtgtgtgggatagaggatttttttaagggagattttttagttgttggtttgatatagtgattgttataaatatttttaataaaggtgtataagaagttagatttgttttttggagtttgagtttttgtatgttaggtgtttgggagaatattttttttttgatttggggaaagtaaaatttgaattttaatataaatatatttgtatatgtttttttttttggttttgtttttaggtggtgtgggtgtgttgttgaatgttagtgttagggggtggggtgggggagggagtgaggttttttgagagttgggttgggtttgtggtgttgtgattggtttgtttggattttgtttttagtgtatgttattagtattttattagttgtttgtttgggttttggaggtagttaatgttgttagtttgaggtaggtgtttgatatggtgagtgtagtgttgttgagtggattttagtgtgtggtggtagtggtggtggtggtgttttttgggttttggttttggtttttgttgttgtttttttttgttgtggtattgatttttataggtaggtgtgggtattgattggttggtttttaaatttttgaaggtattttagtagttttggttatagaggggggaaatgtttttatgataatttttttttattttttatatttgaagtggagggagtgtggagaggaaatttagggttgagagggaaggggttgagggtatttgtgagtttttttttttttgtttggttaagtgtgaatgagagtttttagggatggttgtatttatattttttttttttggtttggtgtggggtgtagagtggagtgagaatggggggtttgggggttgtaaagtatgggggaaggggatggtttaaagataattttaattttttt

SEQ ID NO: 877 - DNA, 2197 bp, Artificial Sequence
  chemically treated genomic DNA (Homo sapiens)
ttatatttagttttttgaagttttggttgtataattaatttgtggaaggtatgaatatttatgtgtgttttaattaaaggtttttttgaattattttttatatgagaatttttaatgggattaagtatagtattgtggtttaatataaatatataagttaggttgagagaattttagaaggttgtggaagggtttatttattttgggagtattttgtagaggaagaaattgaggttttggtaggttgtatttttttgatggtaaaatgtagttttttttatatgtatattttgaatttttgtttttttttttttagatgttttttgttagtttttttagttgttaaatatagttgtttgtggttggttgtgtatgtaattgtatattttattttatttgttttattttggttatagtgtagttttttttagggttattttatgtatatattatgtatttttagttaatgaggagggggaattaaatagaaagagagataaatagagatatattggagtttggtatggggtatataaggtagtatattagagaaagttggtttttggatttgttttttgtgtttattttaagtttagttttttttgggttatttttagtagatttttgtgtgtttttgttttttggttgtgaaatttagtttttatttagtagtgatgataagtaaagtaaagtttagggaagttgttttttgggattgttttaaattgagttgtgtttggagtgatgtttaagttaatgttagggtaaggtaatagtttttggttgttttttagtatttttgtaatgtatatgagtttgggagattagtatttaaagttggaggtttgggagtttaggagttggtggagggtgtttgttttgggattgtatttgtttttgttgggttgtttggttttattggatttgtaggtttttggggtagggttggggttagagtttgtgtgttggtgggatatgtgttgtgttgtttttaattttgggttgtgttttttttttaggtggtttgttggtttttgagttttttgttttgtggggatatggtttgtattttgtttgtggttatggattatgattatgattttttatattaaagtatttgggatggttttattgtattagatttaagggaatgagttggagtttttgaattgtttgtagtttaagatttttttggagtggtttttgggtgaggtgtatttggatagtagtaagtttgttgtgtataattattttgagggtgttgtttatgagtttaatgttgtggttgttgttaatgtgtaggtttatggttagattggttttttttatggttttgggtttgaggttgtggtgtttggttttaatggtttggggggtttttttttatttaatagtgtgtttttgagtttgttgatgttattgtatttgttgttgtagttgttgttttttttgtagttttatggttagtaggtgttttattatttggagaatgagtttagtggttatatggtgtgtgaggttggtttgttggtattttataggtatttgtgtttgtgttgtttgttggggtggttgttgtgtttggtaggagggagggagggagggagggagaagggagagtttagggagttgtgggagttgtgggatgtgtgatttgagggtgtgtgtagggagtttggggtgtgtggtttagtttgggggttttgtgtgtagtttgtgttgtgtttagagttaagtttttttgttgggtagttgaaaaaaatgtattttttatttatttattgtttgtgtgagaggtagatttgaaagtttgggttttttaataaaatatatgttggaaaattagataaagtagtagttatttgtgggggaaaatatttttaggtaaataaatatggggtgttttgagttatttgggaaggttttgtttttggtatttaaagttgggggtgtttggagttagtagagtttagtagagttttatttatttttttaatgtttttgtttaatgtgttttttaaatttttttttatttagattatttgattggaaatatgttagttatgatgatgattttttgggaagtgatttttgttatttgttttttttttttttttattttatgttttggggttttagagagtgattgggagttgaatgggtttgattttggagttagttggttgagtttgtgttg

SEQ ID NO: 878 - DNA, 2197 bp, Artificial Sequence
  chemically treated genomic DNA (Homo sapiens)
tagtgtggatttagttagttaattttgaaattagatttatttaatttttaattgttttttaaagttttaggatgtggggtggggaggaggggaaagtgggtgataggaattgttttttagaaagttattattatagttgatatatttttaattaaatagtttagatgaaaggaaatttggggagtatattaaataaaaatattaaaaggataaataaaattttgttgagttttgttaattttaaatatttttaattttaaatgttaagagtgagatttttttaagtgatttaaagtgttttgtgtttatttgtttggaggtgtttttttttataaataattgttgttttgtttggttttttaatgtgtgttttgttaggaagtttgggtttttgggtttgttttttgtatggatggtaagtgggtggagagtatgttttttttagttgtttggtgagagaatttgattttgaatgtagtgtgggttgtatgtagaatttttgggttgggttgtgtgttttgggttttttgtgtgtatttttgggttgtgtgttttgtggtttttgtagttttttaggttttttttttttttttttttttttttttttttttgttgggtgtggtggttattttgatgggtggtgtgggtgtgggtatttgtagaatgttggtgggttggttttgtgtattgtgtagttgttgggtttgttttttaggtagtagggtatttgttggttgtggggttgtaggaaaggtgatagttgtggtggtgggtgtagtagtattagtgggtttggagatatgttgttgagtggggggaaattttttaggttgttggagttgaatgttgtagttttagatttggggttgtaggggaggttggtttgattgtagatttgtgtgttggtggtggttgtggtgttgaatttgtaggtggtgtttttggggtagttgtatatggtgggtttgttgttgtttaggtatattttgtttaggggttgttttagggggattttgagttgtggatggtttaggggttttagtttgtttttttggatttgatgtagtagggttattttagatgttttggtgtggagggttatggttatggtttgtggttgtgggtagggtgtagattgtgtttttgtagggtagaaggtttagaaattggtgggttatttggaaaaagagtatagtttgaggttagaggtgatgtagtgtatgttttgttgatatgtgagttttggttttggttttgttttgggagtttgtgggtttggtgaagttgggtgatttgatgggagtaagtgtagttttaggatgaatgttttttgttagtttttgggtttttgggtttttaattttaagtattggttttttgagtttatatgtattataaaggtgttggaggatggttagggattgttgttttgttttgatattggtttaaatattattttaggtataatttgatttggagtgattttaaagagtagtttttttgaattttattttatttgttgttgttgttggatagaggttgagttttatggttagggggtgggggtgtatgaggatttgttaaaggtggtttagggaagattgggtttaaaataaatgtgaaagatggatttaggggttggttttttttaatgtgttgttttatgtgttttgtgttagattttgatatatttttgtttgtttttttttttgtttgattttttttttttgttggttagaaatatgtagtgtgtatataggatgattttggggaggattatattgtaattgagatagggtagatagaatggggtgtgtggttgtatatgtagttagttatagatagttatatttagtagttgggggaattgatagggggtatttgaggggaagggggtggagatttagggtatatatataggaagagttgtattttgttattaggagaatgtaatttgttaggattttagtttttttttttgtaaaatgtttttaaagtagatagatttttttataattttttgagatttttttagtttgatttgtgtgtttatgttggattatagtattgtatttggttttattaggaatttttatgtgaaggatgatttagaaaaatttttggttagggtgtatatgggtgtttatgttttttataggttggttatgtaattaaaattttagaaaattgaatataa

SEQ ID NO: 879 - DNA, 2302 bp, Artificial Sequence
  chemically treated genomic DNA (Homo sapiens)
aaattttagatttttttttttattaaatatttttagtttaggttgtagtaggtggatataggttggtagttatgaatgtaggtttatatgggagttgtagttttgagttaagtggttgttttatagaatggttagaagtgagattttgttttttaggagatattttgttgtgtaaaatggtatgttatgaggtggagtatttgtttgatgagaaataagaggtgggattgtaatttttagaagtttttgtggttaaggttttaggttgtaggttgaagttaaggagggagagtttaggtagatttggtttaatattaggtgtgagtagggattatttttggtagtttgggtttggtttaggttagaattttattaaaataattattgtgagtattttttattggttttagtatatttttgagagattagaataataatagtagtaaatttgtaagtggtaaatttttataagtataattttaatttagattttggttttaggtaatattttttggttatttgatttgggagtattgagttttttgttttttagataagtgttgtgagtggttgttttaaggtaatatagtgagggtagaatgtgagtttatagagaaatttgtagatgtattttaagttttattaatttgtttttttattttttattattattaatttggatatatttttaaaatttttttttttgatgttaaaaataaaaataataattataaaataagtgtaagaaagtttgattaagtattgatgagtttttttataataataaatttgatgtttttttgtttgtttttgaagtagtaatgtaaaattattttttaaaatgttgttttttttatattttggtttgtttttgttttgggtatgtgtttagtaattttttaggggaatttagagttgtgtgtttaatatagatttgttgggatggatttttgttatttgtttatgaaattgatgaattattttaaaatggtgggtgttgattatatttttagagttaagagttgtggtgtttttggatttgttggtgtggttttgtgttttagtttttttaatgtataaatatggtggaggaggaatgggttagggttagggttggtgtttgggaattggggggtttgagtttttattttgagatttttgtggggtggaagagtatttgggatagaagtttattgttttgtgagtggtgttggttttattgggttttggggtgatgatttgatgtgtgtggaaatttagatttgtgttttagaaatagtattttatttgggtttgtttttttgtttttattttttaggatgttgatagttgggaatgaaaggtagagggagggagtgtggggttggagtgttgtttgggagtgtgtttattgggtggttgtttgagggatttgggaatagagggtaaaaagttttgtgattggatagagtagagtggggattgtaatttttagaagattttatggtaggggtgggatttaagatggttgtttgtttggggataggagtggaggttaatatgtgtagagtatgtgtttatgttgggttaattgaaagttatagtgatagtaattttgatttaggggtgggaaatattgattatagaagataagttgaggtgagaatttttttataagggggtttggggtataaattgtataatttttggttttttttaattagaaaaagaaatatgattttttttatgtgtaatgaaaggttgtattgtatttttgtttttttttttttttttaaaatgtgtttaattatttttttatgattttttattggttggatttttttttgttttatttttttattttggatttttttggattttttaagtttttttttttttatgtgttttttagaaatatagatttgtagtttttggtttgatttattaaataatgtggttatttatgattatgtttagttttttttggtattttaataaaattgtattatatgtgttttttttttttttttttttgttttttttgtgttgtttttttttttagtatttgttgttatgaagtattgtataaaatttatgtatttattttttttattattttatttttttattagaatgtaagatttttgtagatgtggatttttgttttggttattgtagtttttttagtatttagaaaagtgtttagtatatagtaaatatattgtatttttaataattgaatgaaatttagagtgattttttttttttagtttttttttttttggtgtagattaatttgtttttgattattatggttttttgt

SEQ ID NO: 880 - DNA, 2302 bp, Artificial Sequence
  chemically treated genomic DNA (Homo sapiens)
ataaggaattatggtggttagaaatgggttgatttgtattagagaaagggagattaggggagaaaggttattttagattttgtttaattattgaaaatatggtgtatttattatgtgttgggtatttttttaggtgttagaaagattatagtgattaaaataaaaatttatatttgtagggattttgtattttagtgagaaagtaagatggtaaaaaagataaatatgtaaattttatataatgttttgtaatgataaatgttaaggagaaaaatagtatagaaaagatagaaaggaaaagagaaggggtgtatgtggtgtaattttgttaggatgttagggagggttgagtgtagttgtaaatgattatattatttgatggattaagttagggattgtaagtttgtgtttttgagagatatataaagaaaagaaggtttaaggaatttagaaagatttagagtggggaaatgaaatgaaaagaaatttagttagtgggaagttgtgaagggatagttaaatgtgttttgggaggaaagaaaaaagtaaaagtgtggtatagttttttgttatatgtgaaaagaattatgtttttttttttagttagaaaaagttaaagattgtgtgatttatgttttaaatttttttgtaaggggatttttattttaatttgttttttgtggttagtgttttttgtttttgaattagggttattgttattatggtttttaattggtttggtgtaggtgtatgttttgtgtgtattggtttttgtttttgtttttagataagtggttattttgggttttgtttttattgtggggttttttgggaattgtagtttttgttttgttttgtttggttataggattttttgttttttgtttttgggttttttaggtggttatttagtgggtatatttttaggtggtgttttggttttgtgttttttttttttgttttttatttttagttgttaatattttggaaggtaggggtggggaggtaagtttaagtggaatattgtttttggggtgtgggtttgggtttttatgtgtgttaggttattattttggagtttagtggggttggtgttgtttatggggtggtgggtttttgttttgagtatttttttgttttatgagggttttagggtggggatttgggttttttaatttttaagtattgattttagttttaatttgttttttttttattgtgtttatatattggggaaattgaggtatggggttatgttagtgggtttggggatgttatagtttttggttttgggggtgtagttggtatttgttgttttgggatggtttgttagttttatagataagtagtgaaaatttgttttaataggtttgtgttaaatatgtagttttggatttttttaaggggttgttgaatatgtgtttaggataggagtaaattggagtatagagaaggtagtattttgggagataattttatattattattttaaaaataggtaaagaggtattgaatttattgttgtgggagaatttattggtatttggttggatttttttatatttattttatggttgttgtttttatttttagtgttaaaggggggaattttaaaggtatatttaagttggtggtggtggggggtaaggaggtaggttagtggaatttgagatgtatttgtagatttttttgtaggtttatattttgtttttgttgtgttattttggaatagttatttatagtgtttatttgggaaataaggagtttaatgtttttaggttaagtggttaaaggatgttgtttgaagttgaaatttaaattgaggttatgtttgtgaaagtttattatttgtagatttattgttattattattttggttttttagaaatgtgttgggattaatagaaaatatttatagtggttgttttagtaaggttttgatttgggttgggtttagattattaagggtggtttttatttgtatttgatgttaagttggatttatttgaattttttttttttggttttagtttgtggtttgaggttttggttgtggaggtttttgggagttgtagttttgttttttgttttttgttgggtaggtattttattttgtggtgtgttattttgtatggtgagatgttttttgggagatgaagttttgtttttagttgttttgtagagtagttgtttgatttggaattataatttttatgtggatttgtgtttatggttgttggtttgtgtttatttgttgtaatttggattagaaatatttagtaaagaaagaagtttagggttt

SEQ ID NO: 881 - DNA, 2488 bp, Artificial Sequence
  chemically treated genomic DNA (Homo sapiens)
tttttatttaagtttaaagtagtagaagaagggttgaggttaattattagttaagtagtttttatttttttttttatttgtagggtttgtagggtagtgggaagagttttgggttatagatttagaaattttagatttttatattggttttgttgtggaattgttataatatatttttatttttttggttttagtttttttgttgaattagatggtatgggaatttttaagttttttatttgtgagattttttgaattttgatttttttttattttaatattatagtagttttttatatttttttaaattagtgatttttttttttaggttttgattttgttttgggattttttattgtatattagaagtttaatggttttttttgtttattttttgtatagataggtgagttttgggttgtaggaaaggtttagttgattatgggttttttgttttattttattatgaggtttatagatagtgatgaaggtttggatatatagattgtaggataaggttagattggttggtgagaaagggtattttttagtaagaatttttttttttaattaagtagagatggggattgttgtttattgtaggtttttgttttatgttttttttatatttgatttattgatttatagttttttttttattaatttttttttttttaggtattttttatttgtttatattattgtatattttttggttgttttattttttttttgggtttagttttttttaatttttaaattatttatgtttttgtttttttttttttttggttatatttttttttttgtgattagtgttttttatttaaattttttttttatttttaaattatatatttttttttttggaaagagttttttatatagttgtttttttttattatttttttattgtggtttttaattagatttggattattaaagttttttttgaataggttttatttgttttaggttaggttgttatttttgtgtttttttattttttagttttaattaggagggatgtggtaggagtgttgtgtggggttaggtatgttattagttagtttttaagttaatattttgagttttgtggtttgtttattgagtgattttatgtagttattgaaatttttgttgtttattagtttttaggtgtttaggaaagtgtttattatagtgatgttgggttaggttgagagaagttataagagagtaggtgtgtaagggttttgatggtggttttttgtttgggttgttgttttaaatagtttttgtattatatgaggagatgtggtttatgtttttggtttttgaaataggaagttttaggttagggtttatttaggaggggttggtgtgtttattttttaatttattgaggtgggtggggattagttagtggtgttttgttagtttgtgttagtgttagtgtttggtttttgagtttttattttaggttggtaggatttttttttttttttggtttttaggtattttggaatttgagaaggaagtagttaatattagtttgagagttagggtgtatgttatggtggatatttttttgttttttagtttttttttgagtttagtgttagagtagagatgagattagaaaagtaaaatgtttttgggttggtgtttatgttggggaaagttttggttgatttttggtatgggtatttgtttttgttttataagtgaggagtttgaggtttataggggaattgataaggttttaagaaataggagggggtgaatggagtttagattgtaagtttagtttagtgggttttagagtttgtgttttttttttatttttattgtttggtggtggagatagttattagtggtttggtttgtggttgagttgattttgttttttgtttgttttgagtaaaagtttgattttttgtgttttgtttgttttatatgtgtttgtttttttttgtggaatgttttttgttggtttttttttgtttttattttattttattatttagttttttatttgtttttgtaagtgttttgggtttttttggtttttttgtatagttttgagttttagtttaggttgtttttagttttttttttgtagaaattttgttaatttggttagttttttaaggtttatggttgttttttttatttgttgttttttttttggtttgtgtatattagtaagttgtttgtatttttgggtaatttgttgtttttttttgagagtttgttgtgtggtggtttgttattgtatagtttattaagtatttttagtaaaaataagatttgttttgttttgttatttattgtatgttgagggttttgggtgtattgttttattgaattttttattttattattattttttagagataaagttttttgttgtgttttttaggttggagtattgtgatgttattatagtttattgtagttttaaattttggggtttaggggatttttttattttagtttttttagt

SEQ ID NO: 882 - DNA, 2488 bp, Artificial Sequence
  chemically treated genomic DNA (Homo sapiens)
gttggggaggttaaggtaggaggattttttgagttttggagtttgaggttgtagtgagttatgatggtgttatagtattttagtttgggagatatagtgagagattttgtttttaaaaaataataataaaataaaaagtttaatgaaataatatatttaaagtttttagtatgtaataaatagtaagataaggtaggttttatttttattgaaagtgtttagtaaattatatagtgataaattattgtataataggtttttgaaaggaggtagtaaattatttaaaagtgtaggtggtttgttagtgtgtataggttaaagaaagggtggtaggtggggaaggtagttatgggttttgaagagttgattgaattggtagaatttttgtaggaggggagttgggaatgatttgagttaaagtttggagttgtgtgaagaaattggaaaagtttagagtatttgtaggggtgggtggggagttagatggtggggtggggtggggatggaggagggttagtaggagatattttgtagggaggggtaagtatgtgtgaggtgggtggggtgtgaagggttaggtttttgtttaaaataggtagaggataaggttagtttagttgtagattgagttgttggtgattgtttttgttattaggtagtgagagtgaagggagagtgtgagttttgaagtttgttagattaagtttgtaatttgagttttatttatttttttttattttttgagattttgttagtttttttgtgagttttggattttttatttgtaaaatgaggatagatgtttgtgttagaagttaattagagttttttttggtgtgggtattagtttaagggtgttttgtttttttagttttatttttgttttgatgttaagtttaaagagggattgggggatgggaagatatttattatggtatgtgttttagtttttgggttggtgttggttgttttttttttagattttagagtgtttagaggttaggaaagggagaaggttttattagtttggggtagggatttgggggttaggtattggtgttgatgtaggttagtagggtgttattggttggtttttatttattttggtgggttgggggatgggtgtattagttttttttgggtgagttttagtttggggttttttattttgggagttgggggtgtgggttatgtttttttatgtgatgtgagggttatttaaagtggtagtttgggtagggagttgttgttggagtttttgtatgtttgtttttttgtagttttttttagtttagtttagtattattatggtggatgtttttttgggtatttggaagttagtggatagtaagaattttgatgattatatgaagttatttggtgagtaagttgtggggtttaggatgttggtttggggattggttggtggtgtgtttagttttatgtagtatttttgttgtattttttttggttaagattggggaataggggagtgtggagatggtagtttggtttagagtaggtggggtttgtttagagggggttttggtggtttaaatttggttagagattatggtagggaggtggtggaaggaggtagttgtgtgggaggttttttttaggaagagggatatgtgatttggaggtaggaggagggtttggataaagaatattgattataggaaagggagtgtagttaggggagaaaaagaataggggtatgggtagtttagaaattggaggagattgaatttagaaagggaatggggtagttagggagtgtataatgatgtaaataagtaggaaatatttaggaggaaaaagattagtggggaaaaaattgtggattagtgaattagatatgagaaggatgtaagataggaatttgtagtaagtagtaatttttatttttgtttggttagggaagagaatttttgttggagaatgtttttttttattagttagtttgattttgttttgtagtttatgtatttaggtttttattattgtttgtgagttttgtggtagggtggggtaagaggtttatgattagttgggttttttttgtaatttaaggtttatttatttgtgtgaggggtaggtagagaaagttattggatttttgatgtgtagtagagggttttaaggtaaggttaagatttgggagggaggattattggtttaggaggatgtggagaattgttgtggtgttgggatggagaagaattaggatttaaagaattttataggtgaggaatttggagatttttatattatttagtttaatagggaaattgaaattaggagagtagaaatgtattataataattttatagtagagttaatatgaaaatttaaggtttttagatttgtaatttagagttttttttattattttataggttttgtgagtgggaagaaaagtagaaattgtttagttaatgattgattttagttttttttttattgttttgggtttagatggaga

SEQ ID NO: 883 - DNA, 2361 bp, Artificial Sequence
  chemically treated genomic DNA (Homo sapiens)
gaggggttttttgtttttttttttttttaatgtttaaattgttttagagaatgtttattttttttattatttgtgagtgtagggtgtttgtaaagaagaggaggaaggaggaaggtaggggagggagaatggtaaggagagttttgtagggttgggagaaatgagattaagagagattgggagagggtggtagagaagagaggggggattgagagttgtgtttttgtggttgtgtggatttagaaaaaggttggttttattatgatttatgtgtagtttgtgtatttaggggtagatttggggttgggtgggtggtgttgggtttggtttgttttgtgtatttgtttgtttgttgttggtaggggtgttttttttggttttggatgttgtgttaattttttttttgttgttgatgtgggtgttgttggtgttggttgaggtgttgttggagttgtttagggagttttttttgttgtggtggttgttgttgttgggtgagggggttatggtggagtagggtagtggattgggttgaggagagtgtgtggatgtggttggttggttgtatttgggtttggtgggtgttgtgttggtgttggtagtgtagttgtgggtgtgttttttggagttaaagtggttggagtttgagtggttgatgttgagatttatgttattgtagttgtagttgtatttgttggagtgtatgtttgttgagtttttgaattgtttgtttatggaattatgatttttataattatgtaattggtagtttgggttatttggatagtgattgtaaaatgagtttataaaataagagtttatttgttttttgatatgtgtgtttgatttgtggtttgtggttgtttgtgtgtttatagtatttttgtataatttatgatgaattatggaaatgattgggatatgtatttggtttttttttatgtaggtatttaaatatggggtatgattttgaattatgtgtttttgttgtttagttgtaaattttgtttgatgatttttagaggtaaatttgtgtattaataggggagttgggtggaggtgaggggggtggtgtgtgtgttttgggtgtgtgtttgttgttagttgttgttgtttagttggatttgagtgttatttgttggaggtagggtttattgtttagtttttgattgggggttgtaagggttggggttgaattgaggttatagtttattatggtaaaattattgtattttttttgtagttttattaggatgtattaattgttaggttgttagttgttgattgtgtgtttggtgaggatgtagaggattggggggaggtggtgatttgtattttatttataataattttattttttttgttttgtagttttttttatttttgtgttgaggttggggttggtattgattgttttgttagtagttttgaattttgaaaatatagatattatttttggggaagggggaaagttatttagttaattggagaaataaattttgtttgtagtagtagtagttataattatggttttgtttttgtgagtgtatgagggatagtgtttttgttgtttttaaatgataggtgtttattaaagatagtttttgtgtagtgtttttttaaggtgaggttaaattttatatatttttataattgtagttgattttttttttgtgtgaatatggtttttgtgttattagtttgtgatttgatttgtttatgtatttagtttggaaaatttttattatagggtttggttttttgagttagttgggttttaagttggagggttttttttgaatttagtgagtgggtttaggttttttgtagttatagaggttgtttggggtttggggatttgtggggtgggttattggggttttgtttagatttttaggagtaaaatgagggtgataatggaagtattttttggtagtgtttagtatttttgtagttattttttatggttttgaaagatttaagtaaattataaatatagttgagaggtaagtggagtttttttgttggaggtttggtgttgtaggtgtttttggtatgtttggaagttaggattttggtggtttttatggttttgggttttttgttgggttttgaatgttgttgtggtggtgatgtgggtgttattggaggttgggagtgggaatttggagttgggagtttattttgggttgtaatgttttatttgtgtttaggttaatttgttttggttgaggttgttttttttttattgatggttgtatatgtgggattgagagattgggttttgttggggttttttttgttttttgagttttttttttgttttgggaggtggtttgggaggttgtgataaggttgggt

SEQ ID NO: 884 - DNA, 2361 bp, Artificial Sequence
  chemically treated genomic DNA (Homo sapiens)
gtttggttttgttgtggttttttaagttgttttttagaataggaaggaagtttgaggaataaagggggttttaatagagtttagttttttggttttgtgtgtgtaattgttagtggaagagaagtagttttagttgaggtgagttaatttgggtgtgggtggaatattatagtttggggtaggtttttggttttggatttttgtttttagtttttgatagtgtttgtgttgttgttatagtagtgtttaggatttaatgaggggtttagggttatgggagttgttagagttttggtttttagatgtgttaggggtgtttgtaatgttgggtttttagtggggagattttatttgttttttagttatatttgtgatttatttgagttttttggagttgtggaaaataattatagagatattaggtattgttaaggaatgtttttattattgtttttattttatttttggaggtttaagtaagattttagtaatttgttttatggatttttagattttaggtagtttttgtggttgtagggagtttgggtttatttgttgggtttaaggagaattttttgatttggggtttggttggtttgaggaattggattttgtgatgaagattttttaggttggatatgtaagtaaattaaattgtaaattaatgatatgaaaattatatttatatgaaagaaaaattgattatggttataaaagtgtatggaatttgattttgttttggagaaatattatataaaagttatttttaatagatgtttgttatttaagagtggtagggatattgttttttatgtgtttgtaaaaatagagttgtaattgtagttgttgttgttgtgggtaggatttatttttttaattggttaaatggtttttttttttttttgaaggtgatatttgtatttttaaaatttagagttgttggtaggatggttagtattgattttaattttgatataaaaataagaggggttgtaaaatgggggaaataaagttgttgtaaataaaatgtaagttattatttttttttaattttttgtatttttgttgggtgtgtgattggtagttgatggtttaataattggtatattttaatggaattgtgagggaaatgtaataattttgttataatgggttgtaattttaatttgattttggtttttgtagtttttggttggaagttgggtgatgagttttgtttttagtgggtggtgtttgagtttggttgaatggtggtaattggtggtgggtatgtgtttggggtgtgtgtgttattttttttgtttttatttaatttttttattagtgtatgagtttatttttagaggttattaggtaggatttatgattggataataaaagtatgtgatttgaagttgtattttatatttgggtgtttatgtaggagggaattaagtatatgttttagttatttttataatttattataaattgtgtaagggtgttatagatgtataaatgattgtgagttataaattaagtatatatattaaaaaataaatgagtttttattttgtaaatttattttgtggttgttatttaaatggtttggattattagttgtataattatggagattatagttttgtgagtgagtaatttagggatttggtgagtatgtattttggtaggtatggttatggttataatggtatggattttagtgttggttgtttgggttttggttattttggttttggagagtgtgtttgtagttatgttgttagtgttagtgtggtgtttgttgagtttaggtatagttagttggttatgtttatgtattttttttagtttgatttgttgttttgttttgttgtggtttttttgtttggtagtgatagttattatggtgggaaaaattttttaagtaattttagtggtgttttggttgatgttggtagtatttatattagtagtagagagggggttggtatggtgtttggagttgaggaggatgtttttgttagtagtgagtaggtgagtgtgtagagtgagttgagtttggtgttgtttgtttaattttagatttatttttggatgtgtaagttgtatataagttatggtaaagttagtttttttttaaatttatgtgattgtggggatgtggtttttggtttttttttttttttttgttgtttttttttagttttttttggttttattttttttagttttgtggagttttttttgttgtttttttttttttgttttttttttttttttttttttttgtgagtattttgtgtttataaatagtgggggaaatgggtgttttttgggatagtttagatgttggaagggggaggaagtaaaaaatttttt

SEQ ID NO: 885 - DNA, 2421 bp, Artificial Sequence
  chemically treated genomic DNA (Homo sapiens)
gttattttaattgtatgggagttttataatagtatagggagatatttttgattattatttttattaggagggtggagaaattgaggttttgggaggtggttttgatttagggaattaatttgttgatttattaatttatgaagttttatagttaaaaaagattagattaaaaaatgagaatttagtaaaggggttgaggtaggaggattgtttgagtttagaaatttgagattagttttggtaatatagtgagattttttttttagaaaaattttttaaaaaattaggttgtttgaggtagagtgtagtggtttatgtttgtaatttaatattttaggaggttgaagagggtggattatttgaggttaggagttttagattagtttggttaatatggtgaaattttgtttgtattaaaaatataaaattagttggtgtggtggtatatgtttgtagttttagttatttaataggttgagataggagagttttttgaatttggtaggtggaggttgtagtgagttgagattgtgttattgtattttagtttgggtaagatagagtgagattttgttttaaaaaatataaataaaataaataaataaaaaattaggttgttagtttagtggtttatggtttatatttgaaattttagtattttgggaggttaaggtaggaggattgttttagtttaggagtttgagattaggttgggtaatatagggagatatagtgtttttattgtttttgtttgttttgatttgtttttttataaaaaggtaaaagaaaaaaaaattagtttggtgtggtggtgtgtatttgtatttttagttattagagaggttggggttagaggattgtttgagtttaggagtttgaggttgtagtgagttgtgattgtattattgtattttagtttgggtgaaagagtgagattttatttttaaaatgaataaataaaaaattttaaaaaataaaagaatttagttaagtgtaaaagttttttttgattttaggttttagtgagttattggtggggttgggatttgaatttagtggaattagaattgtgtaggttttataatttatttagattttagtaattttaggttagagggttattgtgtttatgtgaggttgggtgggtgggttgttagttttgttttggggaggggtttgtgttgttgattggttgtggttggtaggtgaatttttagttaattagtggtatggggggtggtgtttttggggtttatttggttgtagttatgtatttttttttagtggtgttggaattgtaaagtatttgtgagtttgtggaagttagtttagattttagtttgttttagtttggtttgatttgattgtatttggtgtttgtttttgtttggtgtttttggttagttatgggtttttggagttgtagttttttggtgttgttgttgttgttgtaggtattttggattttttgatttgtgagggatgtatttgggttgtaagttttgtgttttagttttgtgttttttttttttttgttgttattgtttttttttttttaagaaagtttgggttttgaggagtggagtggtttggaagttttgtgtgttttggattttttagtgatgggagtggggggtgggtggtgaggggtgagtgtggtttttttgttttttttagtgtagattgaggtgggggtgtttggttgtggagtttgtggggtgggtttgtgtgggtggtgggggtgtgaagtggggtgtagggggtggggtgtggagaaggggtgttttggtgtaagttgagggggagttaggagttgtggggatgatttttgagggaaggagaggggtatttgtagaaataaaggtatttgttatgttaagaaaggttgtaaataggagtgagggttttggggataagaaagtgaggttggaggaggtgggagtgttttttgttttgaggagtggtgtatttttggtttaaggaaagtggggtattggagaataaagatatttttaataaaatgagaaaggagattgaaagggaatggtgggttaggttttgagggggtgatttggtggtttttttttgggagtttttgggggtttggtggttgtaggttttggggtgggggagggtgatgttgttgtttgtttgttttggggttgtgggttggggtttttttttaattttgatgttgggagtgagggaggggtggtgttgttggttttggtgagtaggagggaattttttgagttatttggttttatttattttttttttattttaggtttttttttggttttgttaggagttggagttttgttattttggttttgatgttgagagttatatgtttatggtgttttggtgttatttggagagaggttgtgttttgggtagaggtgagggtgtgttgttggt

SEQ ID NO: 886 - DNA, 2421 bp, Artificial Sequence
  chemically treated genomic DNA (Homo sapiens)
attggtagtgtgtttttatttttgtttaggatgtggtttttttttaggtggtgttggggtattgtgaatgtgtagtttttggtgttaaagttagggtggtagggttttggtttttggtagagttaagaggagatttggggtgggggaaaggtagatggaattgggtgatttggagggtttttttttgtttattgaaattaatagtgttgttttttttttgtttttggtgttgggattgggggaggattttagtttgtagttttgggatgggtgggtagtgatgttatttttttttattttgaaatttatggttgttgagtttttaggaatttttgggagggggttgttgagttatttttttaagatttagtttattgtttttttttagtttttttttttattttattggagatgtttttattttttagtattttattttttttagattgggaatgtattattttttagagtgaggggtgtttttattttttttgattttatttttttatttttgggatttttatttttatttatgattttttttggtatggtaggtgtttttatttttatggatgttttttttttttttttgaagattgtttttatgatttttggtttttttttgatttgtattagggtattttttttttatattttattttttatattttgttttatgtttttattgtttgtgtgagtttattttgtggattttgtggttagatgtttttgttttggtttgtgttggagggggtaggaaagttgtgtttgttttttattatttattttttatttttattattggggggtttggagtgtgtgaggtttttaggttgttttgttttttaggatttgaatttttttggaagaagggaagtggtgatgatgggagaggaaggggtgtagggttggggtgtggagtttgtggtttgaatgtgttttttgtaagttaggggatttggggtatttgtagtagtagtagtagtgttgagaggttgtggttttaagggtttatggttggttggggatgttgagtgagggtaggtgttgggtgtggttgggttgggttgggttggagtgggttggagtttgaattgatttttgtaagtttataggtgttttgtagttttgatgttattgagagggggtgtgtggttgtagttaggtgagttttggaggtattgttttttgtattgttgattggttgagggtttatttgttggttatagttaattagtagtgtggatttttttttagggtggagttgatggtttgtttatttggttttgtatagatgtggtgattttttagtttggagttgttagggtttaggtgggttatgggatttgtatggttttgattttattgggtttgaattttagttttgttggtggtttattaagatttgggattagaaagggtttttatatttggttgagtttttttgttttttgggattttttgtttgtttgttttggagatggggttttatttttttatttaagttggagtgtagtggtgtgattatagtttattgtagttttgaatttttgggtttaagtggttttttggttttagtttttttagtagttgggagtataggtgtatattattatgttaggttaattttttttttttttgtttttttgtagagagataagttggggtggataggggtagtgggggtgttgtgtttttttgtattgtttagtttggttttgaatttttgggttgaagtgatttttttgttttggttttttaaagtgttaggattttaggtgtgagttatgagttattgagttagtagtttaattttttgtttgtttgttttgtttgtattttttgagatggagttttgttttgttttgtttaggttggagtgtagtggtatgattttggtttattgtaatttttgtttgttgggtttaagagatttttttgttttagtttattgagtagttgggattataggtgtgtgttattatattggttaattttgtatttttagtatagatggggttttattatgttggttaggttggtttggaatttttgattttaggtgatttattttttttagttttttgaagtgttggattataggtgtgagttattgtattttgttttgagtggtttaattttttaaaaaatttttttagagaggggattttattatgttgttgaggttgattttaaatttttgaatttaggtgatttttttgttttagtttttttattgagtttttattttttaatttagttttttttaattgtagagttttatgggttagtgagttagtaaattgattttttaggttaggattattttttaaagttttagtttttttatttttttaatgggaataatgattagaaatgtttttttatgttgttgtgggatttttatataattaaaatgat

SEQ ID NO: 887 - DNA, 2251 bp, Artificial Sequence
  chemically treated genomic DNA (Homo sapiens)
ttataattaagtaatttagaaaaagaaatgtaggtggagaatagtagtttttttttgttaagtaagaggaattggtttaaaggatatttttttttttttttttttttttttattgggtgaatagtgagttgttttggtaaaaagaaattggaaatgttgttgtaagaggtagaaatgtaaatgtggagttaaataataatagggttgttgggttttttagattgtgatggttttttttggtttggtgggtaaatttttggtttagtattttttatttttatgattgatagtttttaattggattttttttatttagtggagttgggggttgtttggaaagattgttttaggaaggataaaggtttggaagttgtgggattttagtagtttgggttttttggattatttttaaatgattattttggaatggagttttagtttttattaggatgttatgggttttaaaatatatagttatgagtttttaatgttttgagatttaaaagttttagattttaatgttttgtgtattttttattttagggattttttatgtttagtattgggtggatgtgtaaagaagtatgttttaggttggtttaaggttttttaaagttttatttttttgtttaggtgtttaattttgagtttggatggttttaatatttttattatttatatttaggttttttaataatgtaatttttatgatgatttttttagttaagtttttattttatttatttttaaatttgttaagtttttattgttttatttttagttttagtgatttttttgagttgaaaatatatggagttgagagtttgtgatttagagaggatttattaagtttagttaggagtttatttaatttagggaagtgtgttattgttgtggaaagtatgtttttagtttgaatgtaaagtgtttttggagtttagtagttatttgttttttggatggtggttttagatttttgagaagtttaaaatttttagtgttagttttgagtatatgggaggggaaaattttaattttattaatttttgtgaggtttttggtataaagttggatagttgttatgataagtaagggtaagtaatttgtttgttggaggaagtaaaggaaatggagttggggaggagggtgtagagttaggatttttgttgatttggtgttgtagatattaatattttggggtggaaaattttgtaagttagagttgtgagggtagaattggtggaaattattttggaggaattttgtattgtgttaaatatgaagggtggaaggaagaaagtttttgtgtttgtttttagttggattttttttttttattagttaaaatgttattttttaggaaggttttttgtaatattatattttaatgtttttttttagatattttatattatattattttatttaattttttttataatttttattattttgataagatttatttgtttattgtttttagtatatggaaatgtaagttttatgaggatatagaatttttttattattttatttattgttgtatttttgagtgtttatattagtgttgggtagtaagtaagagtttgataataaatattttttgaatgagggagataggtttgaagtttggagaatgagatgtagaagaggtgtaagatttgttgtgttttttgtaggtggtgggggggtggtgtaggtgttttaagaattattgtgggatttggtagggggagtgtaggtgttttttgttaagatagaagtgtttagattataatttttagtagttatgaggagttttagggtttgatgggaatgggaaattttttaattttttatgttttggttttgtgggttttgtgggttgtttgtgaaatttgatttgggatgtggtggtttaattggaaggtggattgaaattttgtgatagtaagaggtttgtagtgatttgtggtgttaaggaatatagtgtttttaaaagaattggtgtttgttgtttgtttttttttttgggagttttttgtttatttttagaagaggagggaagtataggtgggtttttttagttttgtgttggatttttgagaattttgaagttattttggttgaggttaatttttgttgtgttttttttgtagtatgaagattttggagatttaattgttagttttggattgttgttttttagattaggatttagttttagtttatttttttttttatgtttttttgatgaataaaaatgtggatt

SEQ ID NO: 888 - DNA, 2251 bp, Artificial Sequence
  chemically treated genomic DNA (Homo sapiens)
agtttgtatttttatttattggggaagtgtggggagaaggatgggttggagttgggttttggtttgaaggatagtagtttggagttaatggttgagtttttaaagtttttatattgtagaggaagtatagtggagattagttttagttaggatggttttgaagtttttagggatttgatgtagagttaaagaaatttatttgtgtttttttttttttttgggagtaggtagaagatttttgggaggagaggtgaatagtggatgttaatttttttgaaagtattgtgttttttagtattgtgggttgttatgggttttttgttgttgtgggattttggtttattttttgattgggttgttgtattttggattagattttgtgggtgatttatggaatttgtggagttgggatgtgaaaggttagaaggttttttgtttttattaagttttagggttttttgtggttgttgggagttgtagtttgaatgtttttattttggtgagaagtgtttatgttttttttattgagttttgtggtaatttttaaagtatttgtattgtttttttgttgtttgtagagggtgtagtaggttttgtattttttttgtattttattttttaggttttagatttgttttttttatttaaaaaatatttattattgagtttttatttgttatttagtattgatataggtatttaggaatataataatgaataagatagtagaaaaattttatatttttataaggtttatgtttttatgtattgaaagtaatgaataaataaattttattagagtgataagggttgtgaaggagattaaataagatggtgtgatataaagtatttgggagaaaatgttagggtgtgatattatggaaagtttttttaaaaaatgatattttaattgatgagaagaaaggatttagttgagagtaaatgtaaaagtttttttttttttattttttatatttgatataatgtaggatttttttaaaatgatttttattaattttgtttttatagttttggtttgtagaattttttattttaaaatgttagtatttatggtattaggttggtgagaattttgattttgtatttttttttttaattttattttttttgttttttttggtaggtggattatttgtttttatttgttatggtgattgtttagttttgtgttaggagttttgtaggggttgatgggattggggttttttttttttatgtgtttaagattggtgttaaaagttttgagttttttaaaagtttagagttattgtttagggagtaggtagttgttgggttttggggatattttgtgtttgggttgggagtgtgttttttatgatggtgatatgtttttttggattgggtaagtttttgattgaatttgatgagttttttttgagttatgggtttttggttttgtgtatttttagtttgggaaaattgttggggttgggggtggggtagtggggatttagtgagtttgggggtgagtgggatggaagtttggttagagggattattataggagttgtattgttgggagatttgggtgtagatgatggggatgttaggattatttgaatttaaagttgaatgtttaggtagaggagtggagttttggggaattttgagttggtttaaagtgtatttttttgtatatttatttggtgttgggtgtagggaatttttgaaataaaagatgtataaagtattgaggtttgagatttttggattttgaaatattgagaatttatagttgtatattttagagtttatggtattttagtgaaaattggggttttattttgaaatgattatttgggggtgatttggggagtttaagttgttaaggttttataatttttggatttttgttttttttggagtgatttttttaggtagtttttggttttgttagatggagaaaatttaattgaaggttgttagttgtggaagtgagaagtgttaaattaggggtttgtttgttaggttgaggaggattgttgtaatttgagaggtttggtagttttgttattgtttggttttatatttatatttttgttttttgtagtagtatttttggtttttttttgttggagtagtttattatttatttgatgagaggggaggagagagagagaaaatgttttttaggttggttttttttatttggtagagggaggttgttattttttgtttgtatttttttttttggattatttagttatgg

SEQ ID NO: 889 - DNA, 2497 bp, Artificial Sequence
  chemically treated genomic DNA (Homo sapiens)
tttaggaagttagagttatgttggtttgggatagtggtttggagattagattttaatgatagaagtattaggtagtggtatttatggtaatgtgtgtatttatagaaatgtaatttatattttgggtttaggagttgaaaaatgaaaagaatgtttagggaggaaaaagggaaatataataataggtagagagtaatttattattttatgggtttgttttgtaaatagttgaagattttggagttagatggttttgtaaattttttaaataggagttatgttaagaagtatgagtgggtataaaaattgttttttaagatataattttaatttggtttgtggaaattggatatgagtaagtttttttaaaatttgagtagaaagtagttgttttttttgggttttttgatgagaatatgtatattgtttttaagtggttggttgagggagtgttgtggtagtgggagaggtgtttttgtgggttttttggtagttgtggtaggaaagggtttgaaggtagtgaaggtgaatgtggtgtattaatttgttggttttgttgatgttgtgtttatttttttttggggtgggtgtggggttagtttaggataggtgtttgggggatgtgtgtttttattttatggggatggtggaggagagttagtgagggtttgaggggtaggtattttaatgaatggtttttttggtgttttttgtgttttgttggtttatttttttttttataaaatgggtttagtttttagtatttattttttgttattaattaggtattttgggagattagtttgtttgaaagtttttgtgttattttgtgggtttttttaggtggtttttttagttttgtttttttttgggatgtttgttgattattttgagtttgtgtggtgtaagagtatgagtgttgagtttgtgtgtgttaaggttgtgtgggtgggtattgatttttttgagaagttttagtgtttttaagttttgatttttgttttttttattttttagttggaaagttgtgtgttaggtagtggggggtggagagaggagtttagattggtttttattttttgttttttgtttggttgttgtttattggttggaggaatttttaggaatgtgagtgtttttttaaaagtgtgtggtttttttgttttgttagttgttgtgtttgagttggtttgtgagtttagggtttttgttgttttttaggagtaatttttattttggatgtataggtattttttgtgtttttttagtttttgttgtttttgttattgtttttggttgttgtgttttggtatatataggtaagttgtttttggtggttgttgaggattaaagttgtttgggatatttatttggagtgttgaggttttagtttttttggtggattttggaatttatattttttttgtttgtttattttagtttgttttttttagttgttggaggattttttagggtaaggttttagagttattttttttagttttgaggtttataaattaatttattaggatattttaagatttttttattttttgaagttttttttaagtttttgtattagtattttagggaagagtttgtattttttttgttttttttgtaattttaaattatagtttttgattttgtttatttttgattttttaaaagtttttaaattgttggttttgtgttttttatattttaaaattagtattttttttttttattttttttttttttttttttttttttttttatgttttttggaaagtaattttgttgttttttattttagtaaatgtggggttaaagagggatggttttggttttgtttttatgtttagttttgtttttgtgtattgtttttttttgtttagttgatttttgatttttggtttttgtgttttttgttataggatttttgttgggtattaatagttttattatggggttggtttggggattaggtgttttgtttttgatgtatgtgtgtggtattaattgtattttaggtgagtttgtgtggtatttttaggggaaggagggataaggaagaggtgttggttattttaggtgtgtttttttatgtgttgtttttttttttttgagtttgattggatattaggatgtagttttattttgattttggtatttatttattttttttagtggttgttaggagtttttattttaattttttgtttttatttttaaggatttagttttttattgttggttttagtttagaaagtttattttgtgtttttttttgtttaatagagtttggtggagataatagtgtgtttgatatttttgaatttattggggttgtttgtaaggggtttgggtgttgattggtgaagggttttgatttttttagtttagttttttgtattgaggatgttaatttgattttttttgtgtttgatgataagttttaagatttggtggatgttgtgtgggtagaaaagggttttttttttttggtattttt

SEQ ID NO: 890 - DNA, 2497 bp, Artificial Sequence
  chemically treated genomic DNA (Homo sapiens)
agggatgttagaaggaggaaatttttttttgtttgtatagtatttattaggttttggaatttgttattaggtataggggggattaggttggtatttttgatgtggaaagttgggttggaagggttggggttttttattagttggtgtttagattttttgtgggtggttttggtgagtttaaagatgttaaatatgttgttgtttttgttagattttgttagataggagagaatataaagtgagttttttaggttgggattagtagtagggggttgagtttttaggggtggagataaagggttggggtgaaaatttttggtaattattgaaagaggtgaataaatattaggattagagtgaagttgtgttttgatgtttagttaggtttaagagggagaggatagtatgtgagggggtatatttgggatagttagtattttttttttgttttttttttttttaaaggtgttatataaatttatttggaatgtggttggtgttatatatatgtattaggaataggatgtttagtttttaggttagttttatggtggagttgttggtgtttagtagggattttgtagtaggaagtataagagttgagggttagagattagttaggtagggagggatggtgtgtagaaatggggttgggtatggggatagggttgggattatttttttttgattttgtgtttgttgaaatgaaggataataggattattttttagagagtatgagagagagagagagagagagagagagaggtggaggaaagagatgttggttttaaagtgtggggggtgtaagattaataatttgggggtttttgggaagttgaaggtgagtaagattaggaattgtagtttggggttgtagggagggtaggggaagtatagatttttttttggagtgttgatataaaggtttaaggaggattttagagagtaaggaaattttggggtgttttgatgagttggtttgtgaattttaaggttggagaggatggttttggagttttgttttgaagagttttttagtggttgagaggagtgggttggggtaggtgagtggggagagtgtaggttttggggtttattagagggattgaagttttagtgttttaggtggatgttttgggtagttttggtttttggtggttgttgggggtgatttatttgtgtgtattggagtgtggtggttgggagtggtggtgagggtggtgagggttggaggggtgtggggaatgtttgtgtgtttggagtagaggttgtttttggagagtgataggagttttgaatttgtaggttagtttgggtgtagtggttggtaaggtggaggagttgtgtgtttttaaaggggtgtttgtatttttggggatttttttggttaatgggtggtggttgggtaggaagtgggaggtgggggttagtttgggtttttttttttgttttttgttgtttggtgtgtaattttttagttagaaagtgaagggggtgggggttggggtttgggagtattagaattttttagaaaagttggtgtttgtttatgtagttttggtgtgtatgggtttggtgtttgtatttttgtgttatgtgggtttggggtgattagtaagtattttgaaaagggatggggttggggagattatttaggagggtttgtggggtggtgtaggggtttttgggtgagttgattttttggaatgtttggttgatggtgagaggtggatattagagattgggtttgttttgtaaaaagaaaaatgggttgatggggtgtaggggatattaagagagttatttgttaaagtatttgttttttgggtttttgttgatttttttttattgtttttgtggggtgaggatatgtgttttttgagtgtttgttttgagttggttttatgtttgttttggagggaggtgagtgtggtgttggtggggttggtaggttggtgtgttgtgtttgtttttgttgtttttgggtttttttttgttgtggttgttagggggtttatagagatgttttttttgttgttgtggtgtttttttggttggttgtttgggggtggtgtgtgtatttttattaaggggtttggggaggatagttgttttttatttgaattttaaggaaatttatttgtatttagtttttataagttaaattgaaattgtgttttgaaaaatagtttttgtgtttatttgtgttttttaatgtgatttttgtttggagaatttgtagaattatttggttttagagtttttagttatttatagagtagatttatagagtaataaattattttttgtttattattgtattttttttttttttttttaaatgttttttttattttttggtttttgaatttgaggtgtgggttatatttttgtgggtgtatatattgttatgagtgttgttgtttagtgtttttgttattgaagtttggtttttaagttattgttttaagttagtatgattttagttttttgga

SEQ ID NO: 891 - DNA, 2451 bp, Artificial Sequence
  chemically treated genomic DNA (Homo sapiens)
tgatgtgtagtgggagttttagaaagtgtggttgaatttgtagtttttaataaatggtttgtttttaaattttagttttaattttttttgagtgataggggtatgttattagtatggggggaaatgagatataagaaatgtttgaaagggaaaaataaggttgggttgttttttttttttggggttaagatagaggtatagaaggtttaggtttgggaggttggattatttttggttggatgttgagttgggtgggagtttaaatagtagggggtttataggaggttggtttaggtagttttgtgtttatttattaggttaggtttaggtatgtttttagtgatagtaggtttaggtatgtttgggggtttgtttagtttttgtttttgttgttttgggttatgggggtttttttgtttttgttttgttttttgggttttgtagtaggggtttttttgggttttgattttttttggttttttattttagatatgtttggagattttaggatgataagtttagggtagtttttttattagggggagtaggatgtggttgttttggtgtttgtgggaattttgggtggtgattgtgtttttttatagatttggtattgtttagagtttagttttttttttttttttggtatttttgttgttttattgagttttttagttgttagttttatagtttttttaggagaggtgggtggtgattttaatttatagtgttttttattgtgatattgttttaaatttgaggaaatttaaatttttgggtgtgtgtaggttgatgggatttgaggaggaggggtaggatgaaggggttgtgtgtgttatgttgggtgtgttgttgttgtttgagtttggtattggtgggaatgtggtgtgtttttgaggtttagttatgttttgtttgtggggtaggtgggtatttttatgtgtgtgggtatgagttgtggtaggagtgtgtggtggtagtggtggttgttttttggggtttggggtgtgtttatttgtataagtgggtgtgtgttgtttgggttgggtggatttggtgggatttgattgttttgttgtttagaggtggagaagaagaggtagtgagtggatgtgattgttttattttgggtaaaagggatagaattagaggtggggagtttgggtagttggtgatttgtgaagatttgaggtgttgtagtggtatttggagtagtgttgggttttttttggggtgtagttgttgttgggggaagggtgttataggttgggaagattttttttttttgtgtttagtagtggggtttattggagggtggtttgtgggttgggttttattgtggtgttttgggattgtggggttaggttgtgttgggtggatgtttattttgttaatttttggaggtttttgggggtttttgtgtgttttggggttgtagagatttaggggaggtgtttgtgaggtttggatttgttttggggtgaagggtatgtggtgagatagagttttgtatttttaatttttggtggaaaatttttgttgttgtttttttttattggtttggagttttttagttttgttttggtagtgttgttttttttattaagatttaggtgtaaaggtttgggtaagttgatttttttgtttttttttttgagttaggttttttggaggtttggtagttgattttagggattgagaatttgaggatatggaatatttgataattattttgtttttgtattaggaagagaaattttgtaatgaggaagtagtaaatttggggtttttgtggataaatgtgtgttgttttttgttttatgtttatgaagagttttggttttttattttgttgtgggttataaaaggttttgagatttagtttagataagttgtgtagttttaaaatgtatttaagatttgtatattttagtttaataggattaggtgaaattggaaattagttttagaaaattagagtgttttatttgtttagttattggatattatttaaaaaatttatttatttttgtttttttatattgaattttattattataaattaaggaatattttatgtttaagaggataaaaatgttattaatattttaaaaaatgagagttttgatttgaattaataattttttattagttttgtgtttttgttgggtattttgtaagttttgataagtataggtaaatgttttatgtttgtttttgtttttttaagtgttatatttggtgattttaaaaatagttattgaagtttgataattattgtttttttttgtgagttttaagttatttgtgttttgtttttgtattttgggtatttatatttttatttttttttttttttttttttttgagtagattgtgaattattttaggtaaatgatttaattttttttgtagttttggtgtttgatatatagggaggggtataaatgt

SEQ ID NO: 892 - DNA, 2451 bp, Artificial Sequence
  chemically treated genomic DNA (Homo sapiens)
atatttgtgtttttttttatatgttagatattaagattatagaaaagattgagttatttgtttgaaataatttatagtttatttaaagaagaaaaagagagagagagtgggaatgtgaatgtttgaagtgtaaaaatagagtataagtaatttggagtttatagaagggggtaataattattaagttttaatgattgtttttgaagttattaaatgtagtatttggaaaaatagggatggatgtagggtatttgtttatgtttgttaaggtttataaaatgtttagtaggggtataaaattgataaaaagttattgatttgaattaaaatttttattttttaaaatgttaataatgtttttgtttttttaaatataaaatgttttttaatttatagtaatgaaatttgatgtgaaaaaataagaatgaatgaattttttaggtgatgtttaatagttaagtaaataagatattttggttttttgaaattaatttttaattttatttagttttgttaaattaaaatatgtaaattttaaatatgttttaaaattgtataatttatttgaattaagttttaaaattttttgtaatttataataaaatggaaagttaaaattttttatggatgtaaaatagaaaatagtgtatgtttatttatgaaaattttaagtttattatttttttattatagaatttttttttttggtataggagtaggatggttattaaatattttatgtttttaaatttttagtttttgaaattagttattaagtttttaaagaatttggtttggggagaaaagtgaggaggttaatttatttaagtttttgtgtttaggttttagtggggagggtggtattgttgggataagattgggagattttaggttggtggagggaaatggtaataggagttttttattgggaattaggggtgtagggttttgttttgttatatattttttgttttggggtaggtttgggttttataggtgttttttttggatttttgtagttttggggtgtatgaagatttttagggatttttgaaggttggtgaggtgggtgtttatttaatgtagtttgattttatagttttggagtgttgtggtgaggtttggtttatgggttgttttttggtggattttattattggatataaagggaggaggtttttttggtttgtggtgttttttttttgatggtggttgtattttggagggagtttggtgttattttggatgttgttgtggtattttaagtttttgtgggttgttgattgtttagattttttatttttggttttattttttttgtttgggatagagtagttatgtttatttgttatttttttttttttgtttttggatagtggagtagttaaattttgttggatttatttagtttggatggtgtgtgtttgtttatgtaaataaatatattttaagttttaaggggtggttattgttgttgttgtgtatttttgttatggtttatgtttgtgtgtgtagaagtgtttgtttattttgtggatggggtgtggttaagttttagggatgtgttgtgtttttattaatgttggatttgggtagtggtggtgtgtttgatgtggtgtgtgtgatttttttgttttgttttttttttttgggttttgttggtttgtgtgtgtttgggagtttgaatttttttggatttggagtaatattgtagtggaaggtgttgtgggttgaggttgttgtttattttttttaggggaattatggagttggtagttgaaagatttagtgaagtaatgaggatgttggggagagggaaggggttgggttttgggtggtgttaagtttgtgagggggtgtggttattgtttagggtttttatgaatgttaaggtggttatgttttgttttttttggtgaagaagttgttttgggtttgttgttttagggtttttagatatgtttgaggtgaagagttggaagaagttggggtttaagggagtttttgttgtggagtttgggaagtggagtgagggtgggaagatttttgtggtttggagtagtggaggtgggggttgggtagatttttgaatgtgtttgagtttgttgttgttggggatgtgtttgggtttggtttggtaagtggatgtgaggttgtttgggttggttttttgtgggttttttgttgtttgggtttttatttggtttaatatttagttggaggtgatttaattttttagatttgggttttttgtgtttttgttttgattttaaaggaaggaaatagtttagttttgttttttttttttgggtgttttttgtattttatttttttttgtgttggtagtatgtttttattgtttagaaggagttgaggttaaggtttgggaatgagttatttgttaagagttgtagatttggttatgttttttgaagtttttgttatatgtta

SEQ ID NO: 893 - DNA, 2347 bp, Artificial Sequence
  chemically treated genomic DNA (Homo sapiens)
tgagattgaggtattggtgggtgtggttgttattgttgtttttttgggtttggatggggttgtttgtggtggtagtgggggtggtggttttaatgggaaatttgggaaggttgtggggttggtattggttataaggtaggaatgtggggagtgtgtggaggtttttgtgttttttttttttttttttatttttagagtgggtggttggaagttgttatagagagggtatgtgttgtttttgggtttggtgttgggtgggtatgtgtagttggggaagttgtttatagtgattggggtggatgaggtatagggtgaattttgtggtggggtaaaggtgttggtagttttggttttgttgttgtaatttttgttttttagtagttgttgagtgtgggttgttaataaggtgtgattgagaggtaggataggtatgtggatgaaatttattattgtggtggttagtggggagtgtttgggtgttattggtgtgttttgttttattagggtgattttgggtgttgagaagtgggaattttttttggggattagggtgatgttttttgttgttgtttttggtgggatagttgtggttttttttttagttgttgtgttatttagagtttgaggtttgttttttagaagtggatttgtagattttttggatttagagttatttttttttttaatttttattgtagtggtttgtggagatggttttattggggttttggattagtgagggtttttagaggttgggagtagtagttgttgggttggtgataggttttggggtagtattttatgggtagttgttgttttggagttgtttttaattttgtatttggattggtttatgagtggggataatatttgttgggtggtgggggtagttggtggatttttgggaagtttggggttaaataggtattaagagttggtgattttgtaggtgggagggttgggttggttttgtttgggatttgagggtgttaatagagtgtttaagatattgtttagtagtttgttgtttttttttgggggattagaattgttgtttttagtattttttgtagttttagttttggaatatgtgttttttatgtttgatagtgattgttggttttgtgtttttttgttggaggggttttgtttttggtagggttgagggaagagtagtttgtttagggagataggtatggttgaaattttaggtaaggtgtttgaggtttggttttttgggaatggatttgtggttgggtgatatagtagtggggatttgattttgggggagggtgggttgtttgttatgtggggagtttggggattttttgtttttagtttagttatgatgattggattttttttttttttttttttgtttttaggaggagggaaaagggaaggaggagggggttttgggaatataggggtagagggaggagaaagtgggtgttgaatgtggttggattggagggatttttattttttgggttgggggtgggggagggtggtgttggttagtttttgtttttggtttttattttgttgttaggggaattgtggttgttgtttgttttagtgagtggtaagtggggagtgtaagaaaaagtagtaattgttaggagattttgttttttaatttggggagttttttaagagagttttttaatttttgtttgaggattggagatgtagagtatttataagtttggtatttgagtggttgtggttgtgatggtaatttagtgatatgtggtttttttattttttgattttttttttggtattaaatttgtgtatgttgtgaagtttttagttttttgttgagttttattgtttttttattaaaattttggggttagttggattttttggtatagtttatttttaggaagggttggatttttgttggttttgtattgtgggtgatagttatttttgaagattttagattttagtagtgtgggagtattagttgttttgggttgtagattttatttaaatgataagtgaagttagtttttattgagaatgttatttatatgtataaatataataaggtttattttgattagtgatagttgtggattggttagatagttttttaataatgtttttttttttagggaggttttgtttaaagtttttttttattttaattattggtaggatttgaaattttggagttggtatttttatttgttattttgaatgttatttttaatagtaggttttttgggatggaattttataagtatattatgttttgttttgtaaattaagaattatgttttatttaattggaaaaatgaatagattttattagaagtagaatttttgttattat

SEQ ID NO: 894 - DNA, 2347 bp, Artificial Sequence
  chemically treated genomic DNA (Homo sapiens)
atggtgataaaaattttatttttgatagaatttatttatttttttaattagatagggtataatttttaatttgtaaaataaaatgtaatatgtttatgaggttttattttaaagaatttgttattgagagtagtatttagaataatgggtggaaatgttaattttagagttttagattttattggtaattggggtagggaggggttttgggtggggtttttttagaggaggaggtgttgttagaaagttgtttggttagtttatagttgttattaattggggtaagttttgttgtatttgtgtgtgtgggtggtatttttaatgagaattagttttatttgttatttgagtgaaatttataatttgaggtggttagtgtttttgtattattgggatttgagatttttggagatgattgttgtttgtagtatggagttagtagaagtttgattttttttgggaatgggttgtattgagaggtttgattagttttagggttttagtgagggggtagtggaatttagtgagggattgagagttttatagtatgtatgagtttgatgttagagaaaaagttgggagataaaggagttgtgtgttattaaattgttgttgtagttgtagttatttaagtgttggatttgtgagtattttgtgtttttagtttttggatagaagttggagaatttttttggagaattttttgagttaggagatgagattttttaataattattatttttttttgtgttttttatttgttgtttgttgggataaatgatagttatagtttttttgatgataggatggaggttaagggtaggagttgattagtgttgtttttttttgtttttgatttaggaggtggagatttttttggtttagttatatttaatatttatttttttttttttttgtttttatatttttgaaattttttttttttttttttttttttttttttggagatgggggaggagaaaaggggagtttagttgttatgattgagttgaaggtaaagggtttttgggttttttatgtggtgggtggtttgtttttttttgaggttggatttttattgttgtgttgtttagttgtaggtttgtttttggggagttagattttggatattttgtttgaagttttggttatatttatttttttggatgggttattttttttttggttttgttagggataggatttttttgatgaaaagatgtaggattagtagttgttgttggatgtggagggtgtatattttagagttgaagttataaggggtgttggaggtagtagttttagttttttagaaaaggatagtggattgttggatagtgttttggatattttgttggtgtttttaggttttgggtagagttaatttagtttttttgtttgtgaggttattagtttttggtgtttgtttggttttgaattttttgaagatttattggttgtttttgttatttagtgggtgttgtttttgtttatgagttggtttgggtgtaaggttggagatagttttgggatggtagttgtttataaagtgttgttttggggtttgttattagtttggtagttgttgtttttggtttttgagagtttttattggtttggggttttagtgaagttgtttttgtaggttgttgtggtggaggttgaggaggaggatggttttgagtttgaggagtttgtgggtttgtttttgaagggtaaattttgggttttgggtggtgtggtggttggaggaggagttgtggttgttttgttgggggtggtagtaggaggtgttgttttggtttttaaggaagatttttgttttttagtgtttagggttgttttggtggagtaggatgtgttgatggtgtttgggtgttttttgttggttattatggtgatggattttatttatgtgtttattttgttttttaattatgttttattggtagtttgtatttggtagttgttggaagatgaaagttatgatggtggggttggggttgttagtgtttttgttttgttgtggagtttattttgtgttttgtttattttggttgttgtaggtgatttttttgattgtgtgtatttgtttgatgttgagtttaaggatgatgtgtattttttttatagtgatttttagttgtttgttttaaagataaaggaggaggaggaaggtgtggaggtttttgtgtgttttttgtgtttttattttgtggttggtgttaattttgtagtttttttggattttttgttggggttattgtttttgttgttgttgtgagtgattttatttagatttggggaagtggtggtgatggttgtatttgttagtgttttagttttg

SEQ ID NO: 895 - DNA, 2364 bp, Artificial Sequence
  chemically treated genomic DNA (Homo sapiens)
atattgtgtataaaaagattagatttaggatgatttggtgggattgttaggggttgattggagtgttgttgggaaggagttttagttttgttttaggttttttattaggtaggattgggatttttttagggtttggaggagtaagtttttgtaggtttagttttaggttggtgtgaaattgaagagtttttgtattttgtttgggttggtgggtttggtttgtattgtttggtattgtttatttgttaggatttttttgtatagagtatttagtagttatttaatgtttgtgatttttgtgataagtgtagtttggtgttggtttataaagtgtaggtttgggggtgggaggagaatatgagttagtagttagggtgtggggtttgtttttgttgaatttgagttttttaggaatttttttgtaagtttaggggtagggttttagggggtggttattaggattttatatgtagtgggatgagggtaatattgtttttttttttttgtagggtgtgggttggtgggtggggtgtgtagggttgttaagttgtgtttgttttgttttgttttgttttggttgtgggagtatagatgtaggttgtgtaggagtgtggtggggttgggttgggtgtggaggttttatttggtttggttgttgattgaggaggggtttggattttagttggtgtggttttagagtttggaaggatatgggttaagtgattttttttttttttttttttgttgtggggttggggttttgttggttggtaggttaagtgtggggagttttttttttggtagagtagttttgtttaggggtaggaggaatagaaagtggaagagtttgtggggtaagtgttggtgtgggtggaggggaaagatggggtggaggggaatgggggtggtttattttggtgtgtggttgtttgtagttgtttggttattttttgtaggtttatgttgtgtagtatgttagtggtgagtttggtgttgtaggtttttaggtagaagttgattagtttgttggtgaggtttaaggtgtttatggatagtagtgtgttttgtgggatgtgtttgtagtttttgtgtagtggtattgatagtagttttagtttgaattttttgagttttttggtggttaggttttttagtgtatttaggatggtgttgtgtgtgtgttttatggttttaggatttttggttgttgttgttgtttattttgttgtagttgttgattaggaggaagttggttttggggtggaatttggattttttgttttttttttattttggttttttgattttttgttttggtttgttgttttttagtaaaaggtgtttttttattatatttttggtttttttttatttaggtttttggattggggttttaggttgttgggggatgttaggattgtgttttttagttggtttgtgaggtgggatttgggagggggttgtagaggggtttatgggtggtgtttgtttgtttttgggtttgtattagtgggtatagattggaaatttgggttggtttttattgggtttattggagtatttaggtttagaattttggatttttagaattttgaaatttttgtggttttttgaattttaggatttttttttatatgttgtagaattttggaattatgatagttagaagtgtgaagtttttttaattttatatattggggaaaaatgagttgtataaaagggtagagagtgtaaatttttttgagttttagttttattttttatgatatggggataattttttggtgtttataaatattttagtataatatggttaatttgatggtttttgaaattttgttagatgttttttaggggagttagaatttgattttaatattgattaaaaaaaagaaaaaagaaagagagatagtttttaggagattaaagattatgaatttgaagttatatagttttttgtttgaattttgattttattttttaagggggatatttggaattttttattttttttttttatttgggttgtaataattattgttttttgtagttatatgattttgatatattatatgtttatatgtttattggatatttatttttttttaaaatgtgaggtttatgagtattggagattttaattgttttattttttgttgaatttttagtgttaagaatgtatttggaaatagttgtgtgtggtggagggtgtttgtaattttagttattagggtggttgaggtatgagaattgtttgaattttggaggtagaggttatagtgagttaagattgtattattgtattttagtttgggtgatagagttagattttatttgaaaaaaaaaaatgtatttggaatatat

SEQ ID NO: 896 - DNA, 2364 bp, Artificial Sequence
  chemically treated genomic DNA (Homo sapiens)
atgtgttttagatatattttttttttttagatggaatttagttttgttatttaggttggagtgtagtggtgtaattttggtttattgtagtttttgtttttgaggtttaagtgatttttatgttttagttgttttagtagttaggattataggtgttttttattatatatagttatttttaggtatatttttgatgttaggaatttagtaaagaataagatagttaaggtttttgatgtttataggttttatattttagagagggatgaatgtttaataagtatataaatgtataatatgttagggttgtatgattataaggaatagtgattgttataatttagatgagagggaaaaataaaggattttaaatattttttttgggaagtagagttaggatttaaataaagaattgtatggttttaagtttatggtttttaattttttggaggttgtttttttttttttttttttttttttaattagtgttgggattaaattttggtttttttaggaagtatttggtaaggttttgggagttattgggttggttatgttatgttggaatatttataagtattggagggttatttttatgttgtagaaaatgaaattgaagtttagagagatttgtattttttgtttttttgtataatttatttttttttagtatgtggaattgagggagttttatgtttttagttgttatgattttaagattttatgatatgtgggagaggattttaaggtttggggaattgtggaggttttggggttttagaaatttgaggttttaagtttaggtgttttaataaatttagtgagagttagtttaggtttttggtttgtatttgttggtgtaagtttagagataagtaggtgttatttatgagtttttttgtggtttttttttgggttttattttgtaggttagttggagggtgtgattttggtgttttttgatggtttggggttttaatttagaggtttgggtgggaggggattaagggtgtagtaaggaagtgttttttgttggagggtaatggattggggtggggagttgggagattagagtgggaggaaggtggggagtttaggttttgttttggagttgatttttttttggttggtggttgtagtggggtgagtggtggtagtggttggggattttggagttatggggtgtgtgtgtgatgttattttggatgtgttggagaatttgattgttgaggagtttaagaagtttaagttgaagttgttgttggtgttgttgtgtgagggttatgggtgtattttgtggggtgtgttgttgtttatggatgttttggattttattgataagttggttagtttttatttggagatttatggtgttgagtttattgttaatgtgttgtgtgatatgggtttgtaggagatggttgggtagttgtaggtggttatgtattagggtgagttgtttttgtttttttttattttgttttttttttttatttatattagtgtttattttgtgggtttttttgttttttgttttttttatttttaaataaagttgttttattggaaaggaggttttttatgtttggtttattgattaatgggattttggttttatggtgggaagggaagggaaggggattatttggtttatatttttttaggttttggagttgtgttagttgggatttaggtttttttttagttggtagttaagttaggtgaggtttttatatttagtttggttttattgtatttttgtatagtttgtatttgtgtttttgtaattagggtagggtagggtagggtaggtatggtttggtaattttgtgtattttatttattaatttatattttgtgggggaagggagataatattatttttattttattgtatgtggggttttggtggttgttttttggagttttgtttttaggtttgtagaggaatttttgaagaatttaagtttagtagggataggttttatattttggttgttggtttatgttttttttttatttttaggtttgtattttatagattagtattgggttgtgtttattgtgagggttataaatgttgagtggttgttggatgttttgtatgggaaggttttgatggatgagtagtattaggtagtgtgggttgagtttattaatttaagtaagatgtggaagttttttagttttatattagtttggaattggatttgtaaggatttgtttttttaggttttaagggagttttagttttatttggtggaggatttggagtggagttgaggtttttttttagtaatattttggttagtttttggtaattttattaaattattttgaatttgatttttttatatataatat

SEQ ID NO: 897 - DNA, 2589 bp, Artificial Sequence
  chemically treated genomic DNA (Homo sapiens)
tttttattttagagggtagttggttttttgttggtgtttaggttgtagggttgatgtttttgtttagttgagggaaggggaagtggaggggagaagtgttgggttggggttaggtggttagggtgttgtatggtttttatttggttggtgtgtgtttttgtaggagagtgtgttgggtagatgatgttggatatgatggaggtgtttggttattttaggtagttgttgttgtagtttaataattagtgtattaagggttttttgtgtgatgtgattattgtggtgtagaatgtttttttttgtgtgtataagaatgtgttggtggttagtagtgtttattttaagtttttggtggtgtatgataatttgtttaatttggattatgatatggtgagtttggttgtgttttgtttggtgttggattttatttatattggttgtttggttgatggtgtagaggtggttgtggttgtggttgtggttttgggggttgagttgagtttgggtgttgtgttggttgttgttagttatttgtagatttttgattttgtggtgttgtgtaagaaatgttttaagtgttatggtaagtattgttatttgtggggtggtggtggtggtggtggtggttatgtgttttatggttggttgggttggggtttgtgggttgttatgttggttatttaggtttgttatttgtttttagttgggtttttgttgttgtttgttgtggagttgtttttgggtttagaggttgtggttaatatgtattgtgttgagttgtatgtgttgggatttggtttggttgttgtattttgtgttttggagtgttgttgtttttttttttgtggtttggatttgtttaagaagagtttgttgggttttgtggtgttagagtggttgttggttgagtgtgagttgtttttgtgtttggatagtttttttagtgttggttttgttgtttataaggagttgttttttgttttgttgttgttgttgttgttgtttttttagaagttggaggaggttgtattgttttttgatttattttgtggtggtagtggtagtttgggatttgagttttttggttgttttgatgggtttagttttttttattgttggatgaagtatgagttgggtttgggtagttatggtgatgagttgggttgggagtgtggtttttttagtgagtgttgtgaagagtgtggtggggatgtggttgttttgtttggggggtttttgtttggtttggtgttgttgttgtgttattttggtagtttggatgggtttggtgtgggtggtgatggtgatgattataagagtagtagtgaggagattggtagtagtgaggattttagtttgtttggtggttattttgagggttatttatgtttgtatttggtttatggtgagtttgagagttttggtgataatttgtatgtgtgtattttgtgtggtaagggtttttttagttttgagtagttgaatgtgtatgtggaggtttatgtggaggaggaggaagtgttgtatggtagggttgaggtggttgaagtggttgttggggttgttggtttagggtttttttttggaggtggtggggataaggttgttggggttttgggtggtttgggagagttgttgtggttttattgttgtgtgttgtgtgataagagttataaggatttggttatgttgtggtagtatgagaagatgtattggttgatttggttttatttatgtattatttgtgggaagaagtttatgtagtgtgggattatgatgtgttatatgtgtagttatttgggttttaagttttttgtgtgtgatgtgtgtggtatgtggtttatgtgttagtattgttttatggagtatatgtgtatttatttgggtgagaagttttatgagtgttaggtgtgtggtggtaagtttgtatagtaatgtaattttattagttatatgaagatgtatgttgtggggggtgtggttggtgtggttggggtgttggtgggtttgggggggttttttggtgtttttggttttgatggtaagggtaagtttgatttttttgagggtgtttttgttgtggtttgttttatggttgagtagttgagtttgaagtagtaggataaggtggttgtggttgagttgttggtgtagattatgtattttttgtatgattttaaggtggtgttggagagtttttatttgttggttaagtttatggttgagttgggttttagttttgataaggtggttgaggtgttgagttagggtgtttatttggtggttgggtttgatggttggattattgattgttttttttttatttagagtgttttttgttagtttgttttgttgttgttgtgtggttttggtttgtattttagggagtggtgggggtggtgtgtagggtttattgtgtttgggataattgtagtgttgttatagtggtggttttattttttggtggttttatttggttttattgttttgtgttttagtttgggggttgggggagaattttgggatgggggtgggatggggtaagggaaatttatatttttgatattagttttgattaaaggagatttt

SEQ ID NO: 898 - DNA, 2589 bp, Artificial Sequence
  chemically treated genomic DNA (Homo sapiens)
ggggttttttttggttaaagttgatattaaaaatataaattttttttattttattttatttttgttttggggtttttttttgatttttgagttaaggtatgaagtagtgaggttaggtgaggttgttgagaggtggagttgttattgtggtgatgttgtggttgttttgggtatagtgggttttgtgtgttgtttttgttgttttttggggtgtgggttagggttgtgtagtagtgatagagtgggttggtgaggggtgttttaggtgggagagaaatggttgatggtttggttgttgggtttggttgttaggtgagtgttttggtttagtattttggttgttttgttggggttgaggtttagtttggttgtgaatttggttagtgggtagaggttttttagtgttattttggggttgtgtaggaagtgtgtggtttgtgttagtagtttggttgtggttgttttgttttgttgttttaggtttagttgtttggttgtgaggtgagttatagtaaagatgtttttggggaagttgagtttgtttttgttgttggggttggggatgttggggagtttttttaagtttgttagtgttttggttgtgttggttgtgttttttatggtgtgtatttttatgtggttgatgaggttgtgttgttgtgtgaatttgttgttgtatatttggtatttgtagggttttttgtttgagtggatgtgtatgtgttttgtgaggtggtattggtgtgtgaattgtatgttgtatgtgttgtatgtgaagggtttgaggtttaggtggttgtgtatgtggtgtgttatggttttatgttgtgtgaatttttttttgtagatggtgtatgggtagggttgggttagttagtgtgtttttttgtgttgttgtagtgtggttgggtttttgtagtttttgttgtatgatgtgtagtggtagggttgtagtagtttttttaggttatttggagttttggtgattttgtttttgttgtttttaaaagggggttttaggttggtggttttagtggttattttggttgttttggttttgttgtatagtgttttttttttttttatgtgagtttttatgtgtgtgtttagttgtttagagttggggaagtttttgttgtatggaatgtatatgtataggttgttattgaagtttttgggtttgttataggttaggtgtgggtatgggtagtttttgaggtggttgttaggtgggttggggtttttgttgttattggtttttttgttgttgtttttgtagttgttgttgttgttgtttgtgttgggtttgtttaggttgttagggtagtgtggtggtggtgttaggttgagtgggggttttttgggtgagatggttgtgtttttattatgttttttgtagtgtttgttgggggagttgtgtttttggtttagtttgttgttatagttatttaggtttggtttgtgttttatttagtgatagaggagattaggtttgttggggtggttggggggtttgggttttgggttgttgttgttgttgtgaaatgggttggaaggtggtgtggttttttttagtttttggaagggtagtggtggtagtgatggtagggtgagaggtggttttttgtaggtggtggggttggtgttgggagggttgtttgggtgtgggggtagtttgtgtttagttagtggttgttttggtgttgtggagtttggtgggttttttttggataggtttaggttataaagaggggagtagtggtgttttgaggtatagagtgtggtggttgggttgggttttgatgtgtatagtttggtgtagtgtgtgttgattgtggtttttgggtttgagggtggttttgtggtaggtggtggtggaggtttgattggggatgggtagtaggtttggatgattggtgtggtggtttgtaggttttggtttggttgattatagggtgtgtagttgttgttgttgttgttgttgttttgtaggtggtagtatttgttgtggtgtttgaggtgttttttgtatagtgttatgaggttggggatttgtaggtagttggtggtggttagtatggtgtttaggtttggtttagtttttggggttatggttgtggttgtagttgtttttgtgttgttagttaggtggttggtgtagatgaagtttagtattaggtggaatatggttgggtttattatgttatggtttaggttgagtaggttgttatgtattattagggatttgaggtaggtgttgttggttgttagtatgtttttgtgtgtgtggaagagggtgttttgtattatgatgattatgttgtataagaagtttttggtgtgttggttgttgagttgtagtagtagttgtttggagtggttgggtgtttttattgtgtttagtattgtttgtttagtatatttttttgtggggatatatattggttgggtgagagttgtgtggtgttttggttgtttggttttagtttggtattttttttttttattttttttttttttagttgagtgggggtattagttttgtggtttgggtattggtgaaggattggttgttttttggagtgggag

SEQ ID NO: 899 - DNA, 2322 bp, Artificial Sequence
  chemically treated genomic DNA (Homo sapiens)
taggtttggtgtgtgtagagaataattttaagtgtattgatgtttgtgagttttttttaaatattgaatgggatttagagtttgagtttataggtggtggttgggggagggagtagggtgttggttgttgtttgggagtgtttgtgttttgggtgatttttggaaggatgtggggtttaaattttggttggggttgggagagtagtttttagaggttttttgtgggattttttgttgggtgggattgtggttttataggagaagtgggtggtaagttttgtttggtggaaagtagttgtttttttttttttgggtttggggtggtgttttttatttttgttttttgttttttatttttgttttttgttggttatattttttgttttttggattttaagtgttttgtgtgttgaggagtttagtgttagtggtggtggttaggagagatttgggtgttaggaaagatgggttgtttgggggatagtagggagtttgggggaaatgtaggtgttgggtatagagttggtattggtgtttttagttttgttgaagattgtggttgggtttggtttgtgggaggggttttggtgttggatttgttttggttttgtgtgggtggttttgttgggttttgtaggagtgatgtgtgttaaaaggtggtgggaaggaggtggggtagagtgtgtttgggattttgatttggatgtggttagttggagaggtggagtgttgggaggagattttggttttgttgtgatttggtggtttgtgttgtttttttgtgtgttgggttaaaaaggtgttaatgtttgtggttgtttattttttgtggtgttttttttttttgtgtttatataatttgtttaggggttgggtagtttgttttgtttttttgtttgtgtatttgtttggaggtttgtgtgtttgtgaaggggatgtagtgaaattggggtttgtgttaggttagttgggatggatgttgatgtttggggttgtgatggttgtaggtaggaggtttagggttggggggtggtttggttttgtgggtgggggttggagtgtagtgttgggtaggtatttgggtttgtagttttgaagttgggaggtgaggggagagtgattggggatgagttgggataaggtgatataggggtttttttggagttggattggtttttgggatttggtgtttgtgagaggttggagtggttagagtttagtttgtgaggagatgtgggttttgtttttagtgttggttgtttttggtgttaaagatagttttgtaggggttttgggagggttttttttttgttgttttttttttattttgggttttgagggttgttgggagggtaattttgggaagaggttggggtgtggggtgtgggtgtaggtggaaattgttagtaagtttttttttgtttgtgtgttttttttgatttgtagggttgtgttaattttgaggttttagtttttttgaggagttagggttaggtttttttttggatagggagaaggatttgggtgggggttttgatttatggagttggttattaagtggttttgatggttttttgagggatagttttttgtggttttgagtttgtttgttgagggtttttggtttgtttttggagtggttttaggtagagaaagtttgtgaagaaatggtttgggttggtttggagggagatattttatgtttttttagtttttgggttgtttttttttgtagtttttgttttttttggggtttggatttggggagtgatgattatttttgtttagtttgtattttggtttggatgttaggagataagtttatgtagtatgtatatgtttgttatataaataggggatagatagatgatttttaattagtaagggtgtagggaaaagtaatgtattttaaatttttgattagaggttatttgtttttaaagatgttgttatttgtttatttattgtttggatatttggaaatggtttaggtttattaatataatgttttggtttttgttgttttgttttttgttgttgttattgttgtttatttgtttagttttagttttgggggaggagtaaataaagtgtgtggtttttggtatttattgagtgttgagttatttttttttggatttatttggggaaagattaaaaagtattttattaagaataggatatggtgtttgaaatgttgttatatatgaatgtatgtattatgtatgtagtttttaaaataagataaaaagttggttgggtatggtagtttatgtttgttattttttatagtttttgggaggttaaggtgggtggattatt

SEQ ID NO: 900 - DNA, 2322 bp, Artificial Sequence
  chemically treated genomic DNA (Homo sapiens)
ggtgatttatttattttggttttttaaaggttgtgagggatgataggtgtgagttattgtgtttagttaattttttattttattttaaaaattatatatgtaatgtatatatttatatatggtaatattttaaatattgtgttttgtttttaatgaaatgttttttaatttttttttgaataaatttaaagaggggtggtttagtgtttagtaagtgttagaggttatgtgttttgtttattttttttttagagttaaggttgaataaataaatagtaatgatagtaataaaaaataaaataataaaaattaaagtattgtgttaatgagtttgagttatttttaaatgtttagatagtgaataaatagatggtagtatttttggaagtaaatgatttttggttagaagtttggggtgtattgtttttttttgtatttttgttggttgaagattgtttatttgttttttgtttatgtagtagatgtgtgtatattatatgggtttattttttagtgtttaggttaaaatataagttgagtaaaggtaattattgttttttaagtttaagttttgggaaaggtaggggttgtaggaggaggtggtttaggagttaagggggtgtgaggtgtttttttttaggttggtttgggttatttttttatgggttttttttatttgggattgttttggagataggttaggagtttttgatagataaatttagagttatagggagttgttttttgggaaattattgaaattgtttagtaattaattttatgggttaaggtttttgtttagatttttttttttgtttagaggggggtttggttttggttttttagggaagttgaggttttgggattggtatagttttgtaggttggagggagtgtgtgggtggggaggagtttgttggtgatttttatttgtatttgtgttttgtattttggtttttttttggggttatttttttaatggtttttggagtttggggtggagaggggatagtaggaggagggtttttttggaatttttgtggggttgtttttggtgttaaaggtggttggtgttgagggtaggatttgtgtttttttgtaggttagattttggttgttttagttttttgtgagtgttaagttttaggggttgatttaattttgagggagtttttgtgttgttttgttttagtttgtttttgattgttttttttttattttttagttttggagttgtgagtttaggtgtttgtttagtgttgtgttttagtttttgtttgtggagttgaattgttttttggttttgggttttttatttgtagttgttgtagttttgggtattggtgtttgttttggttggtttggtgtgggttttggttttgttgtgttttttttgtgggtgtgtgagtttttgggtgggtgtgtgggtggggaggtagggtgggttgtttggtttttaggtgggttatatgggtgtggggaggggaggtgttgtggggagtaggtggttgtgggtgttagtgtttttttagtttggtgtgtgggaaggtagtgtgggttattgagttgtggtggggttaaggtttttttttggtgttttgtttttttagttggttgtgtttaagttggggttttgggtgtgttttgttttgttttttttttgttgttttttggtgtgtgttgtttttgtagagtttggtgaggttgtttatgtagggttgaagtaggtttggtgttagggttttttttgtgggttagatttgattgtgatttttggtagagttggggatgttggtgttgattttgtgtttgatgtttgtgttttttttggattttttgttgttttttagatggtttattttttttgatatttgggttttttttggttgttgttattagtgttgggttttttggtgtgtggggtgtttggaatttaaggggtaggggatgtggttggtggggaataggggtgaggggtggggaataggggtgaggggtgttgttttaggtttaggaggaggggaatggttgttttttgttaagtagggtttgttatttattttttttgtggagttatggttttgtttggtagaggattttgtggagagtttttgggggttgtttttttaattttagttggagtttgggttttatgtttttttaggggttatttaggatgtgaatatttttgggtggtggttagtattttgtttttttttttggttgttgtttgtgggtttgggttttggattttgtttggtgtttggaaggagtttgtgggtgttggtgtgtttggagttgttttttgtgtgtattagatttg

SEQ ID NO: 901 - DNA, 2345 bp, Artificial Sequence
  chemically treated genomic DNA (Homo sapiens)
tgttggttttgtggttttattggatagggtgagtattgagttgtatattttgtagtttattatttttgtgttttgtgtgatgtagtttatttatagttttttgtatatggtttgggttgtgatgatgttgttatttgtataggagtttatttgttattgtgggatggtggtgtaggttattagatttatttagtttagtagggttatggagaagtttagtaattgtaggtttgaattggttatttttgtttttagaaaatattgggggtgttgggtggggagattttatagtaaaataaatgatatttggggggtagttttataaaagaaaatttgaggtggagttttttggttatttaaagagataaaaagggtttgggttaggtgaatgtaaattttgttattaaattatatataaattgatttttttagtgaagtgatggttttgtggtatagggagtaggatatgttgggagggtggttttagataaaattggtggtttttgaaggttaggtggttttttttgggtgtttttggtgattttaggtaaataaaaggtggaggggttgtttgggtgtgtttttgagtgttggtaagttttaaagtattttgggttgtaggtttgaggttgtggtgtgtagtagaggtggtttggaggtgagttagtaggtgtgggtggataggtggggtgtatttgagtatatgtagggtgttgggggtgtggtttgtgtgttttgggagtgtgggagggggaggtgggattggaggggtggttgaggatgatttgatgttattgaagggatatttatttgaattggaagttgtggtttttatttttttttgtttaggtgaggaggaagaaatttgagtattagggttatgtttttttgtttgtttggttttgattgttgttggggaggaggtggtggttttttaggagttttaagttttgagttagtttttttggattggattttttttgaatattgggaagtttttttttttttttttaataggtgtgtttgggatgttgtggggtgtttttgataagttttggtgttgttttttttttgttgggttttgtttaaagtgttttttttttggttttgtttttgtttttatttgttgtttttttttttttttttgttttttattttggttgattttatttttgggggttttggtttgatttttgagagttgttttttttagtattttttttagtgttttggttttttggttttgttatagatatttggtttagtgtggttttttaatagttttatttttttgtgtttttattttaatttaatatgatttatagtttgaattttttgtatttaatttttttatttattattgttttttttggtattaaggtttttaattggaggaagaaattattgggatttaaagttggttgagggtggggagtagggtgagggttaggttagagttttggttatatttattgttttttttttttagagtttttttagatttattttttattttttttattttttttttatatttgtttgttttttttttttttttgggtttgggtttggattgttaattgttgtgtattttgttatgttttattgttttgttttttttataatttggttttttaaggtggttgtttatggttttttattttgtagttttgttatttttttttaaagtattgttttttttttttttttggtattttttttagttttttgttttttttttttttatttttggttattttttttttttgttttttttgttttggagttttttgttttattttttgttttttttttgttgttgtttgagaggaggaagtttgtgttatttaggttggagtgtagaggtgtaattttggtttattgtagttttgttttttgggtttaagtgattattttgttttagtgtttttagtagttgggattgtgggtgtatattattatgtttagttaaagtttttgtatttttggtagagaagggtttttattatgttgtttaggttggttttgaatatttgaattgaagtaatttttttgtttttattttttaaagtgtaggattataggtgtgagttattgtatttagtttattttttgtttttttgtttatttttgtgttttgtttttagtttttttggaatttagtattagtaattaattttttttttttttttttaggtgtatattgtattttttttatttattttgtttagtttttttttaatttttttattattttttaatttttttatattttttagatttttatatattttgtttattttggtttttttttattttatttttttttttttattttttatttt

SEQ ID NO: 902 - DNA, 2345 bp, Artificial Sequence
  chemically treated genomic DNA (Homo sapiens)
gaggtaaaaaatggagagaggaaaatgaaatgagagagagttagaataagtagggtatgtgagaatttgagaagtatgaggaggttggagggtagtaggaagattgggaggaaattgggtagggtgggtggggaaagtgtagtgtgtatttaagaagaggaaagaaagattaattgttgatgttgggttttaaggagattggagataaggtgtaaaggtaaatgaaaagataaggagtgggttgggtgtggtggtttatgtttgtaattttgtattttaggaggtgggggtagggggattgttttagtttaagtgtttaagattagtttgagtaatatggtgaaaatttttttttattaaaaatataaaaattttagttgggtgtggtggtgtgtatttgtggttttagttattggggatgttgaggtggggtgattgtttgagtttaggaggtgaggttgtagtgagttgagattgtatttttgtattttagtttgggtaatatagattttttttttttaaataataataaaaaaaagataaggagtgaaataggaagttttaaagtaggaaaggtaggaaggggagatgattaaagatgaaggaggaaggagtaaaaggttggaaggggtgttgggaggaaggagggagtaatgttttggggagagatagtaggattgtagggtgagggattatggatgattattttagagagttagattatagggaggatggaatagtgaggtgtgatagagtgtatagtaattggtagtttaagtttaggtttgggagggaaagagaaatgggtgagtgtgggggaggggtgggaaaggtggaggataggtttgaaaagattttaagggaggggaatgatgggtgtggttaagattttgatttagtttttattttgttttttatttttggttggttttaggttttagtggtttttttttttagttaggagttttgatgttggaggggatagtggtaggtggggaggttgagtgtaaagggtttaggttgtaagttatgttgggttggaatgggggtataggaaggtggggttgttggggagttatgttaagttgggtgtttgtagtagagttagagaattgggatattgaagagggtgttgaagggggtgatttttagggattgagttagggtttttgaaggtgggattgattagggtaggagataggaaaaaaaaggagagtagtgggtgggggtgaaagtagggttgaggagagagtattttggatagaatttggtggggaaagggtggtgttgaggtttgttaggggtgttttgtagtgttttaggtgtatttgttgggaagaaaggaaggggttttttggtgtttgagggaaatttagtttggaggggttgatttggagtttgggatttttggggagttattgttttttttttagtggtggttaaaattgggtaagtgaaggggtgtgattttggtgtttaggtttttttttttttatttgggtaaggaggggtgggggttatgatttttggtttaggtgagtgtttttttggtgatgttaggttatttttggttgtttttttggttttgttttttttttttgtgtttttggggtgtgtgggttgtgtttttgatgttttatatatatttaggtgtgttttatttgtttgtttgtatttgttggtttatttttgagttatttttgttgtgtattgtagttttggatttatagtttaggatattttgggatttgttggtgtttagaaatgtgtttagatggtttttttattttttgtttgtttagggttgttgagagtgtttggagggaattgtttggtttttggggattattaattttgtttggaattatttttttggtgtattttattttttgtgttgtgaggttattgttttattggaggggttgatttgtgtgtagtttggtgataagatttgtatttatttggtttaaattttttttgtttttttgggtgattggaaaattttattttaagtttttttttgtggggttgttttttaagtgttgtttgttttattgtagggtttttttgtttggtgtttttagtgttttttgagggtggaaatggttaatttgggtttgtagttgttgggtttttttatggttttgttgggttgggtgggtttggtggtttgtattgttattttgtagtggtagatgagtttttatgtgggtgataatattattatggtttaggttatgtataaggggttgtggatggattgtgttatgtagagtatggggatgatgagttgtaaaatgtatgatttggtgtttgttttgtttggtaaggttgtgggattgatg

SEQ ID NO: 903 - DNA, 2415 bp, Artificial Sequence
  chemically treated genomic DNA (Homo sapiens)
taaggatgtgggaataggtaagtaatttttatattggatttttattttagggagttgggttttagttatagttttgagttgtgtgattttgggtaggttttatttttttggggttttgttttattagttgaatagtatgaggatgagttatagttaatatttgttttatgatatttatttagtattatataagtgttatttttgtttttttagttaatattgatgtgggtagtattatatgtttattttatagatgaggaaattgaagtttgaagaagttaaatatttattttagaatatatagttggtaagtggtagatttggaattggaatttagtttagtttgattttttaatttatgtttttgattattatattgtttttttaagtttagatttgaaattttattttttgtgtggttgtgtgtttgggataggggtaattaatttttgattattttatatgttgtatagaatttggagaggattttttaaagtaaatgaattttgaaagttggattgtagagtaaatgagtgtagttaatttagttaggggtttgtaagagggagaaagagaaaaagattgtggaatggaaagttttttaatttaagttttttttaaggggtagttattttttgttttatagtttagggtttgtatgtgttttttttggagtggaaaaatatataagttataaggaatttaatagatagaaaggtgtatagaggaatttaaagtgtgggttggggggtgaggtggtgggtgggaggtgagtgggtgtaggtggaatattgttttttaagttaagttgttgtaaataaaaaggtgtaaagggagagaagttggtgtttaatgtgagttaggagtagtgttttggttttttttttgtttattttaaaagtattttttgtattgtttttaaggtgagaaataggaaagaaaatgttggtttgtgtgtttgttgtttgtttttttggttgtttgtttttgtagggttgttgggagtttttaagttttgtgagaattttgggagttggtgatgttagattagttgggttatttgaaggttagtagtttgggtagggtttattgaaagtttatttgtatatattaggtaatttaattttttattttgtgtgatagaagtagtaggaagtgagttgtttagaggtaggagggtttattttttgttaaaggggggattagaatttttttatgtgagttgtttgaggattgggatgttgagaatgtgagtgatttgagtagggtttgtttgggtattgttggggtaggatttggaatgtatttggaaggttttttgtaagtatttatttggaaggagaatttgggatttttttgggaattttttgttttggttggattggttgagtaagtttggaaaatggtaaatgattatttggattaattataggtttttagttggtttgtttgttataatttatgatttggggttgggaaaaagattaatagtttatgtgttaaaaaaggggtagagtttgatggagttgggtggatttttttatgttatttgtttttatatttagaggataagtatttttgtagatatttagtgtaagggagattatgtttgattgtatggatgttttgttagtgagttttgggtaaattttggatttttatattgtgagtttgtttttttgtatgttttaggagaaagtttttaaagtatgttttagtggattgatttaaattgaatggtagtattggtatattgtttaatgtaggtttatttttttttttttttttattaagaaaaaaaaaattgttttttttgtatgtaataaagatgttggaaataaattgtattggtagtaagataaaggatttaatgatttaatgttgaaggggtgtgatatgttggtatgtatattgattttttttgttgaaaattttttgttagatgttttttttttaaataattttttttgtttttatgtttttttttttattaattttatagttttttgaaaatagtttttaaaatatgtataaaaatgtggggggtggggagtagagggtgattataagattttaaaatattttttaagtagggtaatttgatatattttgtagtttttattaaaatgtatgtagagtggaatttaattttgttgttttttggattagttattagttgtataggtttttttattttttgtgtattttaatagtttaaagtaattaaaatatgatattttttttgaaaggaatttagtttaattaaggtggttgttgtttttgaagtttataaattattagtttaagttgttgtttttaatgttttttttgttaaggaaaggtaatattttttagtattgattttgttgttatttttttaagttattttgttggtttaagaagttgttgttttgt

SEQ ID NO: 904 - DNA, 2415 bp, Artificial Sequence
  chemically treated genomic DNA (Homo sapiens)
gtaaaatagtaattttttagattaataaagtgatttggaaaggtggtagtagggttaatgttaagaaatattgtttttttttagtaaggaaaatattggaagtggtagtttgaattggtggtttatgaattttgggagtagtagttattttaattaaattaaattttttttaaggaaaatgttatattttaattattttggattgttggaatatataaggggtggggggatttatataattagtagttaatttaaagaatagtaaagttaaattttattttgtatatattttagtaaaaattgtaaaatgtgttaaattgttttatttgaagaatgttttaaagttttgtggttattttttattttttattttttatatttttatgtatattttaaaaattgtttttaagagattataaggttggtaaggagaggagtatgggggtgggaggggttatttgggaagaaaatatttaataggaaatttttagtaaagggaattaatatgtatgttagtatattatatttttttagtattaaattattaaattttttgttttgttattaatgtagtttatttttaatgtttttattgtatgtaagagagataatttttttttttttggtagaagaagggaaaaaaataaatttatattgagtagtgtgttgatgttgttatttggtttgggttaatttattgaagtatgttttgagagtttttttttggagtatgtaggaagatggatttgtagtgtagaaatttaggatttgtttaggatttattgatagaatatttatatagttaaatatgattttttttgtattgaatgtttgtaaaagtgtttattttttaggtgtggaggtaaatggtatagaaaagtttatttaattttattaaattttgttttttttttggtatgtaggttgttggttttttttttagttttgaattatgaattatgatagataagttagttaaaagtttgtaattgatttaaatgattatttattattttttaggtttgtttggttaatttagttggggtggggggtttttagaaagattttaagttttttttttaagtaaatgtttgtaaaaagttttttgaatgtgttttggattttattttgatggtgtttagataaattttgtttggattgtttgtgtttttggtattttagtttttaaatagtttgtatgggggaattttggttttttttttggtaaagaatagatttttttgtttttgaatagtttattttttattatttttgttatatagaatgaaagattgaattgtttaatatatgtgagtgaatttttggtgaattttatttgggttgttaatttttaaatgatttaattagtttgatattattaatttttaggatttttatagagtttaaaaatttttagtagttttgtaaaagtagatagttagagaggtaggtagtgagtgtataagttggtgtttttttttttattttttattttaaaaataatataagaagtgtttttaaaatgagtaggggaggagttgggatgttgtttttggtttatgttgagtattaatttttttttttttatgtttttttatttgtggtggtttagtttggaaaatggtgttttgtttgtgtttgtttgttttttgtttattgttttgttttttagtttatattttaaatttttttgtgtgtttttttgtttgttaaattttttataatttatgtatttttttattttagaaaaagtatatgtaagttttaaattgtagaatagagaatggttattttttgggaaaggtttgggttgggaaattttttattttatagttttttttttttttttttttttgtaagtttttggttgaattgattgtatttgtttgttttgtaatttagtttttgagatttatttattttgaaaaattttttttaggttttatgtagtatatagagtagttaggaattggttatttttgttttaaatatatagttatatagaaaatgagattttagatttggatttgaaaaaatagtatagtggttaagagtatgggttggggaattaaattgaattagattttaattttaggtttgttatttattagttgtgtgttttgggataagtatttaatttttttaggttttagtttttttatttgtaaaatgggtatataatattatttatgttagtgttaattgggaggatagaaataatatttgtatggtgttgggtaaatattatggaataaatgttagttgtgatttatttttatattgtttaattggtgaaataaaattttggggagatgagatttatttaaggttatatagtttagagttgtgattagaatttagttttttaggatgaaagtttaatgtgaaaattatttgtttgtttttatatttttg

SEQ ID NO: 905 - DNA, 2442 bp, Artificial Sequence
  chemically treated genomic DNA (Homo sapiens)
tttttaatatgtttttgaaataaatttagtttaattttgaaagtataaatatggttaaaggtagtagtagtaaagattttattaatttgtaattttttattgagtttttgaaggtgttttataatgtttattaagaagttaaagttataaagttattgtttgtttgagaagtggattgttgttgtttttattgaaattaagaatgtttttatttttttttttagagagaatattagttttaaagtttttttttttttaagttaattgtttagatattgtttattaatttttttattatgttttgatttagattttgttagtaaagtttgaaatttaggttgtttaatgtttttggttttaattaaaattatttatttggatatggtatttatgatttgattaatatttatattataggagtttaatagttttaagtgaagaaattttgaataatgaatgatattttaatagttggggtttatggtttttttttttatgtatgagatgagttttgagtttttattaattatttttaaagtatgggttgtggttagtttaattattttttgtaagttaagttttgttgtttgtagggattttaggattgttgatatgagtgtattaatattgaaatgatgagttaggttgattatggttagaagatttttttgtatttttaatttagggtttatattgtggataaagattaggaggtagtttttataggttataaaagtttggttgtttaaggtaagagaataggttttaaagtttttggtttggttaaaaagttggttgtgtagatttttgttaatgtttaggattttttgttttgtgatatttggagataagttaatgttttgtaggatgtttatatgtttgggtagtattttttttagtaatatttttatgtattggtatataaagttttttttattttagttgtgattttttaaggttaagaggtggtagagtttgaggtttgtatgagtagttttttttttaggagtgaaggaggttatgggtaagttgttttgatgtagatgttttattagggttgtgtgtttgttgtttgttatatattgtttgtagtatttgtgtttagttttgtagtggtgtttgatgttgtgtttgtgggtagttatgatgaggtggtgatagattaggtatagggttttattgttttttggaggttttattattaaataatgttgggtttatttgggttggaaaattagagttttgttgatttttattttgttttttttgggtgttatttatattttgtgggaggttataagagtagggttaatgttagaaaggttgtaaggggagaggaggagtttgagaagtgttaagtattttttttgttttgtgttagattattttagtagaggtatataagtttggttttggtatttttgtttttattggttggatattttgtattttttgagtttttaaaaatgaattaataggaagagtggatagtgatttttaatgtgtaagtgtatatttttttaggtagtgggtagtagttgttttagggagggatgaagagatttagtaatttatagagttgagaaatttgattggtatttaagttgtttaattaatagttgttgttgaagggtggggttggatggtgtaagttatagttgaaggaagaatgtgagtatgaggtattgaggtgattggttgaaggtatttttgttgagtatttagatgtttttttggtttttttggtgttaaaatgttgtttgtggtaggggttatttggtggttggatgagatagtggtgaattgtattgtggtgggggaagttatttagtggttagttaatgttattaaagagatgattgagaattggtatggagggagttgagttgggtttatttaagggttatgatttaatgggttgtgttatttaatggtgtggatatgtttttttgtttgggtagaggtatgtatagtgtatgtttataatggtggaggttgttgggttttttgatgtgttagttaggttttttttttttttgtagattgtgtgtttttttattgtttttttttgagattttttaagggttgtttggagtgtaagtggaggaatatatgtagtgttgttttaatggtattgttaattaagtaaggaagttatttaatttaaaattatgtatgtagaatatgtgaagttaaaagatgtataaaagtttaagatggggagaaaaatttttttttagagggtattgtgttattgtttttttgttttttatttattttagaaattatttgtttatatttaaaggtataatttattttgagttttttttaaaataaattgtttgtagttttaggataggttgatgtattttgggtttgatttttgattattttattgttaaattagtgattttttttagtgtttttttgttttttattttg

SEQ ID NO: 906 - DNA, 2442 bp, Artificial Sequence
  chemically treated genomic DNA (Homo sapiens)
tgaaataaaggataggaaaatattaagaggggttattaatttaataatagggtaattagaagttaagtttaaagtgtattagtttgttttaaaattataaatgatttgttttgaaagaaatttaaaatgaattgtgtttttggatgtgaatagatgatttttggaatgaatgaaaagtaagaaaatagtaatatagtattttttgaaaaaaggtttttttttttattttaagtttttatatattttttaattttgtatgttttgtatatataattttaaattaagtggtttttttatttagttaatggtattattaagataatattatgtatatttttttatttatattttaaataatttttaaaaggttttgggggagagtggtaaagaaatatatggtttgtggaaaaggagaaggtttgattggtatgttagggaatttggtggtttttgttgttgtgggtatgtgttgtatatgtttttgtttgggtaaagaggtgtgtttgtgttattgagtgatgtggtttgttaagttgtagtttttaagtgagtttggtttgattttttttgtattagtttttaattatttttttgatagtattagttggttgttggataattttttttgttgtgatgtggtttattattgttttgtttagttgttgaataatttttgttatgaatgatattttggtgttagaagagttaaggaaatgtttagatgtttaatggaagtgtttttagttaattattttagtgttttgtgtttatgttttttttttagttgtagtttatgttatttagttttattttttagtggtagttattgattggatagtttgaatgttagttaaattttttaattttgtgggttgttgggtttttttgtttttttttgaagtggttattgtttgttatttagaaggatatgtgtttgtgtgttagagattgttgtttgttttttttattggtttgtttttaggagtttggggaatatgaaatatttagttaataggagtagagatgttggaattgggtttgtgtgtttttgttgaggtgatttggtgtagagtggaggaggtgtttggtgttttttaggttttttttttttttttgtggtttttttaatgttggttttgtttttgtggttttttgtagaatgtggatgatgtttaaaagaagtaagatggaagttgatgaggttttagttttttggtttgagtggatttagtgttatttggtggtggagtttttggagggtgatggggttttgtgtttggtttgttgttgttttattgtagttatttgtgaatgtgatgttaggtgttattatgaggttgagtatgaatattatgagtggtatgtggtggatggtgagtgtgtggttttggtggagtgtttgtgttagggtgatttgtttgtggttttttttatttttgaagagagagttgtttgtgtaggttttgggttttgttgttttttggttttgaagggttgtggttggggtgagggggattttgtatattagtgtatggaggtgttgttgagagaggtattgtttgagtatgtaagtgttttgtaaggtgttgatttatttttagatattataaggtagaggattttgagtattgataggaatttatgtaattagttttttaattgagttagggattttaaagtttatttttttgttttggatgattaggtttttgtggtttatgagaattattttttggtttttatttgtggtgtaggttttgagttggaggtgtaagaagattttttgattataattaatttgatttattattttagtgttggtgtgtttatgttggtaattttagagtttttgtagatagtagggtttagtttgtagagaatggttggattgattatgatttatattttgaggatgattggtgagaatttaggatttgttttatatatgagagaaaaggttgtaagttttaattgttggaatgttatttattatttaggatttttttatttggaattgttgagtttttatgatgtagatgttaattagattataaatattatatttgaatggatagttttgattaagattagaggtgttaggtgatttgaattttagattttattaatggaatttgaattagagtatggtgaaagggttaatggatgatgtttgaataattggtttaggagagggaaaattttaaaattaatattttttttaagaaaagaaatggaagtgtttttggttttagtaggggtaataatagtttattttttagataaataatggttttgtgattttggttttttggtggatattatggaatatttttgagaatttagtgaagaattatgagttagtaaagtttttgttgttgttgtttttgattatatttgtatttttgaagttaagttgaatttattttaaagatatattgagga

SEQ ID NO: 907 - DNA, 2319 bp, Artificial Sequence
  chemically treated genomic DNA (Homo sapiens)
ttgatttaataggtttgtggtgggatttaggttagtggggaggattgtaaaagtatttttggtgattttagttggtgtttatttaggggagagtaatttttgtttgttggtgatttttaggggtgtagaaggattgttgggtgtgtggttgtgtgtatattttagtatttgatttattgggttagaaaagggtgtttgttaaataaagatttaataaaatttttgtttgtagggggtttattaaaggttttaaatttttttaggtttttttttataggtggtaatttttttttattttaaaggttttggagggggttatgagtgtttgagaagaggtaagtttgggaagatggattttgaggatagtaggtataaatttttttttaagaagggttaaggtattttaaagataagaaatttaaaattagtgtatttttatatataagtagttatttttgtttatttgtggtttagatatgagtggagtgtgataagggataaattatttttgtgtattttttagtgatggggtgaaagtaatggatttagtttttgggagttgtttttgttgattttttttgttgtgatttgatttgtggtgattgtgttgttttttggttgttttttttgtttttgtaggtgtgtggggttattatttatgtgtgtattgtaggtttttgtgtatgatgttttagatgaagttgttatagaggttgtattatgtgtgtgtggtgggttttgtgggttggaagtggtggttatggttagggattagttgttgtgtggggttgtatgtggtgttttgtgtgatgtgtagtgtgttggtatgttttagttgggtgtggttttttttagtgtgtttagtgggtgttagtttttgtagtttaatgagtttaggtttttttgatatggtttggttgggtttgtgttttgttggttttgggtgttagtaagtgtgggttgggtggggttatagggtgggttttgattttagtgttttttttaggatttagattgggtggtgggaaggagttgaggagagttgtgtaatggaaatttgggtgtagggattgtggggtttgaaggtggggttgggtgtgtttttgtagagttttttttgttttgttttttttttttttttttgttttttttttatattttattttggatggttataatgatggtgattgtaaagtattatgtggagatatttgtgtttttggaggttagttttattgtgttagaggaagagggtttttatatttggttttggtttttttggtttggtttgttgaagtaatatatttggtttatttattgggtggggtaggaagttttgagtttttatttggggtgaggaggagggagattggttagtagttttattgtttgttttgttttttattgtggagattggggttttggtagaggttggattgtgattttgaggtttaggggtgtattttgggtggatttttttggtatgggtggttggtttttagtaattgtagtttttatttggttttgttattttgggttgttaggatataagtttttttatgttttttttagtgtttgatttggtattttttgtaggtaggtgggtattgaggatggtaatgtatgtgggggatgtgggagtagggtttagaggtttaaggttttaggatatttttatttgtagtaatattatttattttggtattgtgagtagtgtttagaagtttttgtattgtagtaagtatagtggggttgttttggagttattgtttttagtatatttagtttgtaggttttagtttatttgggggaaagttaggaaggtttgattggttttggaaggtgggggtattttatttatatttatgttttttgtattttttttattttttttgttatttttataggttttatttttgtgtttgtagttgtaggttttgttttgaggggttgaatatatgttggagttggtgtttggtaattgtttgttatttgtttttgtttttttgttttagttgtttttagatttttgggatttaggagagagaagtggagagtggtaggaaggtgttggtaaagtgggatagtggttttgagtagttaattttttagtgtttatttgttttaatattaggttttttttaggaggttgggttttagttagggttagatgggttaggaaattttgtaagtgggttaggttgggtagttggtttagtagtgtgtttgtgaggaaggtttgaagttgtaagggtgtttagtggaggttagtgtgatgtaggtgttggttagggggttaaggaaaaggaaggggttggg

SEQ ID NO: 908 - DNA, 2319 bp, Artificial Sequence
  chemically treated genomic DNA (Homo sapiens)
tttagttttttttttttttttggttttttggttagtatttgtattatattggtttttattggatatttttgtagttttgggttttttttatagatatattgttggattagttgtttaatttggtttatttgtagagttttttggtttatttgattttaattgaaatttagttttttaagaaggatttggtgttggaataggtaggtattggaaagttagttgtttaggattattgttttattttattagtatttttttgttattttttattttttttttttagattttagaaatttgggagtggttggagtgagaaaatagaggtaagtggtaggtaattgttaagtattagttttagtatgtgtttagttttttagagtaggatttgtggttgtaggtgtgaaggtaaggtttgtggaaatggtagggagggtggaggggatgtaggaggtatggatgtgggtggggtgtttttattttttagggttagttagatttttttgatttttttttaggtgggttgagatttataggttggatgtgttagaggtagtggttttagagtggttttgttgtgtttattgtagtgtagaggtttttaagtgttgtttatgatgttagaatgagtggtattgttgtaggtgagggtattttagaattttggatttttaagttttatttttatattttttatatgtattgttatttttaatatttatttgtttgtagggagtgttaagttaagtattgggaaaagtatggaaagatttgtgttttggtagtttagggtgatagagttaaatgagggttgtagttgttgagggttgattatttatgttaagggaatttatttagaatgtatttttgaattttaagattatggtttagtttttgttggagttttagtttttgtagtggagagtagagtgggtggtaaagttgttgattgattttttttttttttattttaagtgaaggtttgagattttttgttttatttagtgggtaggttaagtgtgttgttttagtaaattggattaggagggttagggttggatgtggggattttttttttttagtatagtaaagttggtttttagaaatatgggtatttttgtgtggtgttttgtggttgttgttgttgtggttgtttggggtggggtgtgaggaggggatgaaggagggaaggaagggtaaggtggggggggttttgtgagagtgtgtttagttttgtttttgggttttatagtttttgtatttaggtttttattgtgtggttttttttagtttttttttgttgtttagtttggattttgggggaggtgttgaagttggggtttgttttgtggttttgtttggtttgtgtttgttagtgtttaaagttagtgaagtatgggtttaattgggttatgttgggggagtttgagtttattgagttgtgggagttggtatttgttgggtgtgttgggaagggttgtatttggttggagtgtgttaatgtgttgtgtattgtgtggggtattgtgtgtaattttatatggtagttggtttttggttgtggttattgtttttagtttgtggggtttgttatgtatatgtggtgtgatttttgtggtgattttatttggggtgttgtgtgtaaaggtttgtagtgtgtgtgtgagtagtggttttgtgtgtttatgagagtggaaggggtagttaaggggtagtgtagttgttgtgggttaagttgtggtagagggggttggtggggatagtttttgaggattaggtttgttatttttgttttattgttgaagagtgtgtgaaaatggtttattttttgttgtattttatttgtatttgggttatagatgagtagaggtggttgtttatatgtaaaaatatgttgattttaagttttttatttttaaaatgttttggttttttttgagaaagggtttgtgtttattgtttttggagtttatttttttaggtttgtttttttttaaatatttatgattttttttagaatttttagggtgaagggaaattattatttatgggagggagtttggaaaaatttagaatttttggtgggttttttgtaagtaggagttttgttgagtttttatttagtaaatatttttttttgatttagtgaattagatgttaaaatatgtatgtagttatatatttagtagtttttttgtatttttgggaattgttagtaagtaaaggttgtttttttttgggtagatattagttggaattattaggggtgtttttatagttttttttgttagtttggattttattgtagatttgttgaattaa

SEQ ID NO: 909 - DNA, 2441 bp, Artificial Sequence
  chemically treated genomic DNA (Homo sapiens)
ttgttttttaaaatgttgtttattatattaaaatataattttgttttttaaatagtgagtaaaattaaattaattttatttttttaaatagaagtttatttaaagtttttttataaaaatgatatttatttgatttaatattgtttttttaataagaataatatgtagggtgttagagggtagttgttggatttttttttagtaaataaaggagattagttagagtttagtttggtttgtttaggaaaggaggaatgtagtttgttgatatggttaaggaatgttaattaatatattttaaaatttttattattttgtttgagatgtgtatatttttttaggtttttaaagtttaattagaaagtgtatttaattttattgttattttatttatagtggggaagtttattgaggaaaattatagggaaataaaatgttttttagttatttatattagtataattaatttagagtttatggtataaattaaataagttaatttgttagtgttttgaatgaagatatttaattaaagtatgtattttttaattttttagtagtttttaggatagttggttttggtgattgttttttggttttttattgtttttaatatgattggttttttattgtaggattttaaataaaatgagataattaaattatattttgagtgaaggggtgtttattttgtagataaatatattggttttgttttttttaaaatgtggatatgtgttttttttgtattagggggggttttttggtgtgtgttttgttgttatttgttgaggaaagtgagtgtattttttgtagtttaggttttgggtgttagttttgttttgtagttttagagtttgttgtagtttgggtggtttttttttggtttagtgtttgttgtttgttttttgttttgtaagttttaagaggtagttattttttgtagtttttgtgtttgtaattgttttttggtgggggagtgggtgtttaaaaagttagtagttggagaaattgaaaagattataagtgatttaatgataagtttttttttttttttaaagattgagaggagggtagaggggagtagtgtttgagtttatgtgattgagttagggagtttgatggttttaggaatgtttgatgttgtgtgtgatttttaagtgggagtatttttgaattgatttttggtttatttataaggatagtggtgtatagatggtgttttttgtagttttagttttagatttaagaggtttggagtagggtttgagaatatgtatttttaattaggttttgggggatgttgatattgatatagttagtttggggattatattttgaggattatgtttttagtttttgatttatataagtgttatttagaatagatgtttgattttaaggagttagtggtgaaattagagaggttttgggtttgttaaatttttagtagtaaatgtaattttgggttttggagtggtaaagttgtggattagaggtggagggagtgggtttttagtttttaagaggttattgggaaggttttttgtgttagattaaagattttaggtatttttttgaatttatttgaagtggtattggggagatttgtgtttttggttatggtgtttttttttgttggaggtatttgtttatttttttttttgggtgaaggttttttgtgttttttggtggtagttttagtttttttagtttaatggggtgttttttttatttattttagtaggagttttagggtgtgagattaggattatagttttaattggttttaaggtagttgttgttgatgaaaatgaaaaggaaagtagtatgtgatttataggttattgtgagaattttttagtgttatatttgtgtttaattaattattaaattatttatttaggtggtataagggatatggtttttgagggttgtgatttagatttttaatagaggaagatgagggggggtatttggagggaaagttttatagtattagttttagttgtttggtgtttagttaaaatagagagatgtaagtgtgttttgggttgataaagatgaggtttataggtaatgaagataggttttaaagatggagaagtatttgttttattagttaaataatagttgtgaaaagtttttattgttttattttaagtttaatttttattaaagttgagagttttggttttttttaggttgaaaggtagagtttttttgtttttgaggtagagaagttagtttggatgggaagagtgtgttgttggtaaataattgtagtagataatatgttaattttagtttttttgttttttgttttggggttttttaaagtatttagtttttatatgttttttttttttgttattttatggagaaaatgttaaatgatggtttaaaaaaattagttttatggttaggtatggtggtttata

SEQ ID NO: 910 - DNA, 2441 bp, Artificial Sequence
  chemically treated genomic DNA (Homo sapiens)
tgtgagttattatgtttggttatgaagttgatttttttaaattattatttaatattttttttataaggtggtaaggaggaagagtatatggggattgggtattttgagagattttaggataggagatagggaggttgagattggtatgttgtttgttgtagttatttgttagtgatatattttttttgtttaaattaatttttttgttttaaggatagggagattttgttttttaatttgagagaaattaggatttttagttttaatgaaaattggatttagggtggggtagtggagattttttatagttattgtttagttgatgaagtagatgtttttttatttttggagtttgtttttattatttgtggattttatttttattaatttagagtatatttgtgtttttttattttggttaaatattaaatagttgaggttggtattgtaaaattttttttttaaatgtttttttttgtttttttttattagagatttggattataatttttaaaaattatgttttttatgttatttgagtagatggtttgatgattaattaggtatagatgtgatattggggggtttttataatggtttgtgggttatatgttatttttttttttatttttattagtaatagttgttttaaagttagttaagattgtggttttagttttgtattttggggtttttgttggggtgggtgaggggaatattttattaagttgggggaattggggttgttattagggggtgtgaggggtttttgtttgagaagaggggtgggtaggtgtttttagtggagaagggtgttgtggttggaggtataggtttttttggtgttattttaagtgagtttgaggaagtatttgggatttttgatttaatgtgaaaggtttttttagtgattttttgagagttgagaatttattttttttatttttagtttatggttttgttattttagggtttgaggttatgtttgttgttggggatttgataaatttaaagtttttttggttttattattggttttttagaattagatatttgttttgaatgatatttatgtgagttaggggttgaggatgtgatttttgaagtgtggtttttagattggttgtattagtgttggtattttttaggatttggttggaaatgtatatttttaggttttattttagattttttaaatttgagattggggttgtggggagtgttatttgtgtgttattatttttgtgggtggattaggagttggtttgagggtgtttttatttagaggttatgtgtggtgttgggtgtttttgagattgttgggttttttggtttggttatgtgggtttaggtattatttttttttattttttttttggtttttaaaaggaagaaggggtttattgttaagttgtttgtgatttttttagtttttttagttgttggttttttggatatttatttttttgttaggaggtagttgtaagtgtggaggttgtgagaaataattgttttttgaaatttgtagggtgaagagtaggtggtgagtgttgggttggggagggattatttgagttgtgatgggttttggggttgtggggtagggttggtgtttggagtttgagttgtaggaggtgtgtttgttttttttaataggtggtggtggggtgtgtgttgggagattttttttaatgtgggaaaagtatgtgtttgtattttagagaaggtaaggttggtgtgtttatttgtaaggtaagtgtttttttgtttgaggtgtggtttaattgttttattttgtttgaaattttgtggtgagaaattagttgtgttgagaataataaaagattaaaaaatgattattaaaattaattgttttgaaagttattggaaagttggaaaatgtatgttttgattaaatgtttttatttaagatattggtaagttaatttatttagtttgtgttgtgagttttgggttgattgtgttaatatgaataattgaaaaatattttatttttttatggttttttttgatggatttttttattatgggtgaaatgataatggagttgaatatattttttgattgaattttgagggtttgggaagatgtatatgttttaggtaagatgataggggttttaaaatgtattaattggtattttttagttatgttagtaagttgtgtttttttttttttgggtagattaagttaagttttaattggttttttttatttgttgaagaggagtttaataattgttttttaatattttgtgtgttatttttattggaaggataatattaagttaagtgaatgttatttttgtgaaaaaattttgagtggatttttatttaggaagataaggttgatttaattttatttgttgtttaaaaagtaggattgtgttttggtgtggtaggtaatattttggaggatag

SEQ ID NO: 911 - DNA, 2483 bp, Artificial Sequence
  chemically treated genomic DNA (Homo sapiens)
atattaaatttagaaaaatagggtggggatatggtagggtttagtagtattattttttgaatatttataaatattgttttttttttagtaggtggagttatttgttgttttttgtttttatgtggttttttttatatttaaagatgggattaggatttgtgttggagaatagttttatttttttttttttattttgttttggtataattaatgaatattttttttttttaaagatagagttttatttttgttgtttaggttggagtataatggtataattttagtttattgtagtttttgttttttgggtttaagtgatttttttgttttagttttttaagtagttgggattataggtatatattattatgtttagttaatttttgtatttttagtatagatagggttttattatgttggttaggttggttttaaatttttgattttaggtgatttatttgttttagttttttaaagtgttgggattattggtgtgagttattgtatttggttgttaatatataattaaattttaaatataaatttgtatattggttgattatgtgtatttgtaaaatttttattttttatttttaggaagagggggtttttgtttttattttttatttttatttttgaaattgtgaagaggattataggtaatttgtaggtatttttgttagagtgtttgtgtttttagatatttttttttattgttggtaatttggttttattgttgtgtttagttttttttgtttattgttttggttttggtgtttggaaattgtgtgtttattaaaatgtgaaggtgaattttgtaagtttatgtaaattggataggagggagagtagaggtagagattattgtgtttatttgatgttttgagtgaaaagttatgtgtgtttatgtgatgatggagataggaggattagggttttgtttgtttttttttttgagtttttattgtatttagttttggggtttgggtttttgatggttattatttttttatttgggtttttgtgtagttaagtgtagttttgtatgtttattttttatgttagtttttgtagtgagagtttggtatgtttttttagggagatgaattttttggtgtttttgaggaagtggtgtttgttgtgtttggagttttagaggtttgggggtattagttggtgtaggtaggtttgtatgaagttgtatatttgttaggggttgttgtgttggtggagtagttgtattaggtgatgggggtttgtgtttttttttttgggggttgttatagagttttggggttttttttgggtatagatattggttgttggggtgattgtagtttgtagtgggtagtgtgttttgaggagtattttgtaggggtattgtgtgtggtttttaagtagttttagaaataggggttgtatttgttagtagtgttggggtaggtggggtaatttgtggggagtttttggtatttagggtttggaatttagaaagatggtttttatgagtttttgagtgttagttaggttgggttttagagagttgagtaggaaggagggttgtagttgttttttgttgtttgaggagtagaggaagtgtttggttttggtgtatattgggggataaggtgtgttttagggatgtggtggttgtgatgtggatggggggtttgtgtggtgttggtggtttatggatgggtgggagtggtgtgtgttagagagtgtattttttaaagaggtggtttttttggtgggtttggtaggtgatattatatagaaattatggttatttggtttatgtgttttgtttgggtgggtttaggatttttgtttaatgggtgtttgttttggtttaggggtagtgttatgtttgggttttttgggtaatggtagattttggttggtattgtttttgtgtttttttgtatttggggttggtaggtttagggggattttggtttttttgatgttatggttttaggtttgtttgtattttagatgtttttggggtttattagtgtgtggtgggggttgggtttgagtggtagtgttgagttggtatagtggtggtttgtatatttggtaggtgtagttgggagttattagtataaagagtgtgtagtgtgttagtaggtgaattagtatgttgttgtttatgtggtgtagtagtagtttttatgttttgtttttttgtagtgtgttggttattgtgttgggtaggtagttgtgtatgttggtggtgaaggttttgggggggtttttgtgggttttgtttagtagtgtgaagttgaaggttagtatgttttttgtgttgtgtttgtatagtttttgtagtatttgggttattagtttttttaggtaggatatttgtgggggaagtgttttgagttgtttgtgttgttttttgtatgttgttggttttttttggttgtttttaattttagttggatgttgattttggggaggtttatttggtggaagga

SEQ ID NO: 912 - DNA, 2483 bp, Artificial Sequence
  chemically treated genomic DNA (Homo sapiens)
tttttttgttaggtgggtttttttggggttggtgtttggttggggttgagggtggttggggggaattagtgatatgtggagagtagtgtaggtgatttagggtgttttttttgtaggtgttttgtttgaaggagttggtggtttgagtgttgtagaggttgtgtgagtgtggtgtgaagaatgtgttggtttttggttttgtgttgttggatggggtttgtgggggtttttttgaggtttttattattagtgtgtgtagttatttgtttaatatggtgattgatgtattgtgggggagtggggtgtgggggttgttgttgtgttgtgtgggtgatgatgtgttggtttatttgttggtatgttgtgtgttttttgtgttggtggtttttagttgtgtttattaggtgtgtgggttgttgttgtattagtttggtgttgttatttaggtttggtttttgttatatgttagtggattttgaaggtgtttgggatgtgaatgggtttggaattatagtgttagggaggttggggtttttttgggtttgttagttttgggtgtgaggaggtgtgggggtagtgttagttgaagtttgttgttgtttaagaggtttaggtgtggtgttgtttttgagttggagtggatgtttgttgggtaggggttttgggtttatttgggtaggatgtgtggattgagtgattgtggtttttgtgtggtgttatttgttagatttgttgaagaagttatttttttggagggtgtgttttttggtatgtgttatttttatttatttgtgggttgttagtattatgtgggttttttatttatattgtggttattatgtttttgggatatgttttgttttttggtgtatgttgagattaagtattttttttattttttaggtgataaggagtagttgtggtttttttttttatttagttttttgaggtttagtttgattggtgtttggaggtttgtggagattatttttttgggttttaggttttggatgttagggattttttgtaggttgttttgtttgttttagtgttattggtaaatgtggtttttgtttttggagttgtttgggaattatgtgtagtgtttttatggggtgttttttaagatgtattgtttgttgtgagttgtggttattttagtagttggtgtttgtgtttgggagaagttttagggttttgtggtggtttttgaggaggaggatatagatttttgttgtttggtgtagttgttttgttagtatagtagtttttggtaggtgtatggttttgtgtgggtttgtttgtgttggttggtgtttttaggtttttggggttttaggtataatgaatgttgtttttttaggaatattaagaagtttatttttttggggaagtatgttaagtttttgttgtaggagttgatgtggaagatgagtgtgtgggattgtgtttggttgtgtaggagtttaggtgaggaggtggtggttgttgagggtttaggttttagagttgaatgtagtaggggtttagaaaagggggtaggtagagttttggtttttttgtttttattgttatgtgggtatatgtggttttttgtttaggatgttgagtggatatggtgatttttgtttttgtttttttttttgtttagtttgtataaatttatgaggtttatttttatgttttgatggatatgtggtttttaggtgttgaggttagagtagtgaatagaggaggttgggtgtggtagtggagttgggttgttggtaatggggagaagtgtttggaagtatagatgttttggtgagggtgtttgtaggttatttataattttttttgtaattttaagggtgggaatgagaggtggggatgagaattttttttttttgggggtgggaggtaagggttttgtaggtgtatgtggttagttaatatgtaggtttgtgtttaagatttaattgtgtgttgatggttaggtgtggtggtttatgttggtaattttagtattttgggaagttgaggtaggtggattatttgaggttaggagtttgagattagtttgattaatatggtgaaattttatttgtattaaaaatataaaaattagttgggtatggtggtgtgtgtttgtaattttagttatttgggaggttgaggtaggagaattatttgaatttaggaggtggaggttgtagtgagttgagattgtgttattgtattttagtttgggtgataagagtgaaattttgtttttaaaaaaaaaaagtgtttgttgattgtgttaggatagggtagagggagggagataagattgttttttagtatagattttggttttatttttaggtatgaagagggttatatgggagtagaggatagtagatggttttatttgttgaggaagggatagtgtttgtgggtgtttaggggatggtgttgttgggttttgttgtgtttttattttgtttttttggatttgatgt

SEQ ID NO: 913 - DNA, 2374 bp, Artificial Sequence
  chemically treated genomic DNA (Homo sapiens)
tgaaatttagagaggttaaaggatttttttaaggttatagagttagtaataaatatagtttttattataattttgtttattatagttttgtgtgtttgttttttttatagttatttttattatattagagtttgttttagtatatgattttatttaatagatttttttttttttttttttttttaagtgttaaatatatgttattaaaaaaagtgatatattgggtagtattttaaatttaagtgttttgttaattaaaattatatttaaattttataagtatataggtttagtttgtaaaatagaaaggtataattatttatagttttttaagttttttttgaaattggtgtgtatgttttggaagttttaagaataattattgaaaatttatttattaattttgaatggtttgtaaagtattagttttatttttattttttttagagtttatagttattttttttttggatatattttattttgtagattatgtaaggtaatgtaattaattttaaagtttttttagttttttttaaagtataagaaaattttttaaaatattgaatataaaattaatttttgggaagttttagattttgagaataggaattattttttaattattttttttgattgtgattatttaggttttttatttaaaatgtattaattggaaatatttaaaagaaatgtgggagggggttggggggttggaagaaagtggagaatagatatttatatatataaaaaaagggatttgatatatgaataatatttttgtttaatgttaattttttgttttgatttaaggtttgatataatttttgttgtttttttgattattttttttgaagagaggggttaaagttggtatgttttgtggagattgtttttagatttaggaaggggtatattagggtagtggatgatttgttttgtgttttttaaaattattgttagtttaattagtaaattgagagggtagttttgagatgtaggatggttagagagttgaaatgagtttgggagttaagagtgggatggggtggatgaataggtgtggggagggtaaataatgtattaggagtgggagtgagaatagggttgaggtggggttagtgaaaggtaaaaggtgaagagaagaaggggatggggttttgggtgggatgggtggtagtaaagggggaggggatgtgagaaggttgggggagggggagaagggtttggggtggggtggaagggagtaaagaggtgggatgaagatggttaggttgggagggtttttatttgtagttttgtttgttttattttttattgggttttttttattttgaagtgggtttatttgtgttgtaggaagtgtaggatttttgggagattgtattgggtttgggttgtttttgttgtagttgttttgttgttggttgtggtagtttttgttagaggtttgagttttttggtattgttggtgtttgggtggttgttgttgaagaagatgttgggatttgtttgtttgtttatggtggttgtagatatttggggagttgttttggtgtttagtagtggaggtaatagtggtggtaagtagtgtttttttttttttttgttgtttttgtttatattttagttagtagggagtagttttttgggtgtgggggttggttgagtttgtgatgggttgggaaatgggttaattgtggtgtgttggtggtttggggtttgttgggaaatgtagttgtggggtggggtgtgggttagtgtggtttgggtggtttgtagggttgtgttttagtttgggtgtggttttgggtttgttttgttttggtttgttgtgtagggggttggttgggtggggagagtgggttttttttggggttggttgggtgtgggtgggtgggtttttagttttttttgtatgtggaagtttgtgggtggtgtattttgttgtatttaaaaatatatatatatatatatatatatatatatggaagttgttatgttaagatatttgtttgagttgtatattttttaaggttttttggttgttttgtgaaggaataggtttaaagtgagttatttggtgtggttgtgggattggggtttttttgttagttgttttgtgtgtttttgttttggttttgtgtttggagttttttttattttagatgtttttttattttgttaatttgtgggttgttgttgtttttgttttttttttttgatttgaggggtttaaatttgttatttgattagtttttatttttaaggaatgttgattatttttttaagataatgttgtagttttttgttgttgtttttaaattgtggtttgttgatagtttatttgaaaaattgttttgttgaagttttt

SEQ ID NO: 914 - DNA, 2374 bp, Artificial Sequence
  chemically treated genomic DNA (Homo sapiens)
agaaattttaatggagtagttttttagatgggttgttaataaattataatttggaagtagtagtagaaagttgtggtgttgttttagaaaggtgattggtgttttttagaaatgaaaattggttaggtaataggtttgagttttttgagttaaaagagaaaggtaagagtgatagtgatttgtagattggtagaatggaggagtgtttagggtgagagaaattttgaatatgaagttgaagtgagagtatgtagggtagttggtgggagaattttggttttgtggttgtattgggtagtttgttttgagtttgtttttttatagaatggttaggaagttttaaaagatgtgtagtttgggtaggtattttggtgtgataatttttgtgtgtgtgtgtgtgtgtgtgtgtgtgtgtttttgaatgtaatagggtgtgttgtttgtgaatttttgtgtgtgaggaagattggagatttgtttgtttgtgtttagttggttttagaggaaatttgttttttttgtttagttggttttttatgtggtgagttggggtggggtgggtttgaggttatgtttaagttgaggtatagttttataggttgtttgggttgtgttagtttgtgttttgttttgtgattatattttttggtaagttttgggttgttagtgtgttgtagttgatttattttttggtttgttatgggtttggttggtttttgtgtttaggaggttgttttttgttgattggggtgtgggtgggagtggtggagggaggaggaggtgttgtttgttgttgttgttgtttttgttgttgggtgttggggtagttttttgggtatttgtggttgttatggatgagtaggtgggttttggtgttttttttagtaataattatttgggtgttggtggtgttaaggggtttgggtttttggtggaggttgttgtggttggtgatggggtggttgtggtgggggtggtttgagtttagtatagttttttggggattttgtattttttgtagtatgagtgggtttgttttgaggtggagagagtttagtgggaggtggagtgggtggagttgtaggtaaagatttttttggtttggttgtttttattttgtttttttgtttttttttgttttgttttggattttttttttttttttttagtttttttgtgttttttttttttttgttgttgtttattttatttggagttttgttttttttttttttttgttttttgttttttgttgattttattttgattttgtttttatttttgtttttggtgtgttgtttattttttttatgtttgtttgtttgttttattttatttttaatttttagatttattttaattttttggttattttgtattttagggttgtttttttggtttattaattgggttggtagtagttttgagagatgtggagtaaattgtttgttgttttggtgtgtttttttttaggtttagagatagtttttgtagaatgtgttggttttggtttttttttttaaggaaggtgattaagaagataatagaagttgtgttaggttttgagttgaggtgagaagttgatgttgggtaaaagtgttatttatatattagatttttttttttatatatgtaaatgtttgttttttatttttttttgattttttggtttttttttatgttttttttaggtatttttaattaatgtattttgaatgaaggatttagatgattgtagttagagagaatggttaagaggtggtttttgtttttagaatttgaaattttttaagggttaattttatgtttagtgttttgggagatttttttgtgttttaaaaggaattaaagggattttgaagttagttatattgttttgtataatttgtaagataaagtatatttagggaggagataattgtgggttttgaaaagaatgaaagtgaggttgatattttataagttatttagaattggtgaataggtttttagtggttgtttttaaaatttttagggtatatatattaattttaaaaggaatttaaagaattatgaatagttgtgtttttttgttttatgggttaagtttgtatatttatgaaatttgagtatagttttagttggtaaaatatttgagtttaaaatgttatttagtgtgttattttttttggtaatatgtatttggtgtttaagaaaaaaaagaagaggagaaatttgttaaatagaattatgtgttggaataggttttggtgtagtggaagtggttgtggaaagagtgaatatataaggttgtagtagataaggttatagtaagggttgtgtttgttgttagttttgtgattttgaggaaattttttaatttttttgggtttta

SEQ ID NO: 915 - DNA, 2414 bp, Artificial Sequence
  chemically treated genomic DNA (Homo sapiens)
gtgtgtatttgtaagtttagattttattttttttttttttttttttttttttgagatggggtttttgtttgttatttaggttggagtgttgttatgtgattttggtttattgtaatttttgttttttagatttaagtgatttttttgttttagttttttgagtagttgtgattataggtatgtattattatgtttagttaatgtatatatatatattttttattagagatggggttttattgtgttggttaggttgattttgaatttttgattttgtgatttgtttattttggttttttaaagtgttgggattatagatgtgagttaatttatttggtttatttttttattttatttatagtaagtttggatttgtttggaataaaataaataattaaatataattttaaagatatttttgttgaatagtgtattttggggataaattatgtaaaataatataaattaaagaaataggaaggaaaaataaaatggttagaaggttgataataaagtgtattataaaaatagtttttaaagagtttgtattttatttttgtttataaataattagttagttagattattgtttgagaatttataatttttagaaagtggattattttttttaatattaagaaattagggttgtgtatggtggtttatgtttgtaattttagtaggttgggattatttgagtttaggagtttgagattagtttaggtaatatagtgaaattttgttgttataaaataaaataaaataaaataaaaaattaaaaattggttaggtgtggtggtataggtttatagttttagttatttgggaggttgaggtaggaggattgtttgaggtagaggttgtagtgggttaagattgtgttattgttttttattttgggtgatagagtaagattttattttttaaaaaaaaaagtttgtttggaagtttttattttatatttaattgttaaattttttttttttattttttgattttatttttttttatatttttaagttaagaatgatgagaaatggatagatgttagtatgagttgggtgtgttttgggtatggggaagtttgaggttttggaaaattttttttatatatatatttggtttttattttttggatgtatgtagtaaatttttaaaataaaattattaaaaaggagaagggggggtgttgtttattgtttttggtattttgtggttgttaatttttttttttttatttggtttttgggatgtttgtgggggaattgtagtgagtagtgtggggtgaggttgttgtggatgttttgttggatgtgttttttgttgggttgagtggtgtagggttggagagggaagtgtttgtgtttattttgtttgtaggtgtttttgttgatttgggtgatggttttttttttgtggtttttggttttttggttggtggtgtgtagttggtagttgtttgggtaggtggtgttgttgttgttgtatattgggtagtggtttttgtatatgtatatgttgtttatatttggattgttggttgttgttttggttttatttttttgttttttgtggttttttatgtattttatgtttggtgtgtagtattttttgttggtgttgttatttttgtatggtttgtttttgttgtgggtgtatatagggtagtagttgtatgtgttgtgggttttgtttagtaggtagtttagtgggggtaggggtgggtaggaggttggtttgtaggggttgtaggtgtttgaagaggaggaagaggagaggggtaggagtaggagtagtagtttagtggtgttgaggagtagggtgtgtagtgatggttgttttatggtggggtgtggtggtagtggtaagggtgtgagtgagttgtgttgggttggttggtgttttaaatttgttgttttgtttggtttgtttgtgggaattatattttggggtggtgagagtatgggggttttgtttgtgttgtttttttggttttgtggggtttgtgtgtgtgtttttgttggtgttggggggtgagtgggtatttggtgtgattggtttatgggtgtttggttttatgtttgttttgtagagtttattttgttagtttttgtttggtttttagttttttgttttgagtttttagggattgtattgtagtgtgagtggtttttttattttttggtttttttttgtttttggttaatatatttaaattttttaataattatggttttgagatgatttagggttttatttattaaattttttgtgggtttgagatatttgagtgtttattattttgtggtttgggaagtttttttaagaataagttgttaaaaatttttatttgtggattgtgtttttgttggttataggtttgttgtggttttgggtgttaagtattaaaagga

SEQ ID NO: 916 - DNA, 2414 bp, Artificial Sequence
  chemically treated genomic DNA (Homo sapiens)
tttttttagtgtttgatatttaagattatagtaggtttgtggttagtggggatatagtttataagtgggggtttttaatagtttgtttttaagagagttttttaaattatagagtaatgagtatttaggtgttttaggtttatggaggatttaatagatgaaattttggattgttttgaagttgtggttgttaagaagtttaaatatattgattggaaatggggagaaattagagggtggaagagttgtttgtattgtggtgtgatttttgagggtttggggtaggggattggggattgagtaggagttggtggggtgagttttgtgaagtgggtgtgagattgagtgtttatgggttggttatgttgggtgtttgtttattttttgatgttagtaggagtgtgtgtgtaggttttgtggggttgggagggtggtatgggtggggtttttgtgtttttattgttttggggtgtggtttttgtggataggttgggtggggtggtgggtttaaggtgttggttggtttgatatggtttatttgtgtttttgttgttgttattgtattttgttatggagtggttgttgttgtgtgttttgttttttggtgttgttgggttgttgtttttgtttttgtttttttttttttttttttttttggatatttgtggtttttgtgagttggttttttgtttgtttttgtttttgttgggttgtttgttgggtgagatttgtgatgtgtgtggttgttgttttatgtgtgtttgtggtgagggtgagttgtgtgggggtggtggtgttggtagggggtattgtgtgttgggtatggagtgtgtgaagagttgtaagaggtggaagggtaaagttggggtagtagttggtggtttgggtgtaagtggtgtgtgtgtgtgtaagagttgttatttggtgtgtggtagtgatggtattatttatttgagtggttgttagttgtgtgttgttagttagagggttgagagttgtggggagaaggttattatttaggttagtaagggtatttgtgagtaaggtgggtatgagtgtttttttttttaattttgtgttgtttggtttagtgaagggtatatttgatggggtgtttgtggtggttttgttttgtgttgtttattgtgatttttttgtgggtattttaggagttagatgggagggaaagagttggtagttgtggaatgttaggagtggtgggtgatgttttttttttttttttttggtggttttattttgagagtttgttgtgtgtgtttagaaagtgagggttgggtgtatatgtagaaaagattttttgagattttagatttttttatgtttaaagtgtatttaatttgtgttaatatttgtttattttttattatttttggtttggggatgtagagagaggtgaagttaagagatgggggaaaggagtttgataattaaatataaagtaaggatttttagatagatttttttttttaaaagataggattttgttttgttgtttagggtggagggtagtggtatgattttggtttattgtaatttttgttttaagtgatttttttgttttagttttttaagtagttgggattataagtttgtgttattatgtttggttaatttttggttttttgttttgttttgttttgttttatagtgatggagttttattatgttgtttaggttggttttgaatttttgagtttaagtaattttggtttgttgggattataggtataaattattgtgtatagttttgattttttagtattgaagaaaatagtttattttttaaaaattataggtttttaaatagtaatttaattagttaattatttgtgggtaaaaataaaatataaattttttgaagattgtttttgtgatgtattttgttgttaattttttgattattttgttttttttttttatttttttgatttgtattgttttgtataatttgtttttaggatatattgtttagtagaaatgtttttgagattatgtttgattgtttattttattttaaataagtttaagtttgttgtaaatgaaataaggaaataggttgggtgggttggtttatgtttgtaattttagtattttgggaggttaagatgggtagattatgaggttaggagtttgagattagtttgattaatatggtgaaattttatttttaataaaaaatatatatatatatattagttgggtatggtggtgtatgtttgtaattatagttatttaggaggttgaggtaggagaattgtttgaatttgggaggtggaggttgtagtgagttgagattatatgatagtattttagtttgggtgatagatagagattttattttaaaaaaaaaagaaagaaagaagaaaataaagtttggatttgtaaatatatgt

SEQ ID NO: 917 - DNA, 2479 bp, Artificial Sequence
  chemically treated genomic DNA (Homo sapiens)
ttatttagttgaagatagaagtattttgaagaagtttgtttttgttaataatatttaaatttagagaagaaattttgttggatttttgggaggtgagaaggagaagtagaggagaagttgttaaaatgatatttttttttttatttttttatggttaattttttattttagggtttgataaggaggtatgttagtttttagtaatagaggttttggtatttttttgttttttaaggtaatgagtagaatttttgagaagatagttatgtgaagagtgtgttttgggaggttagatttgaggtaggaggtttttagtttttattggtggttttggggtagatagttataaggatttaataaattattattttgataaattgaaggttagaggtgggttttttattttttagaggttatgaaaatttttaggttttaggatatattttatgggggaaggggaagtatttaaattttattgatatgaaatttttttttaggttggtagaatggggattggagtttgtttttattatggggaatgaaaatagtaatgttttttgtatagttgatattttgaggtgaaatgtagatttgtggggtattttaataaagtgtagaattttagaatagtgtatatttgtgttatagattagttataattgttggaattggagttaatttagtttttaaaaaaggttattgttttgttagagagaggattatggattttgtatatgttttggtgatttagggtggaggggtggggtggtggggagggtagtaggtttatgttttaaatttttgaggtagatagagaaggaaggaaggaaataagggtagatgttagagtatatttataagattaatttttttgatttttatgtaaatatttagaaagggagagatatataaagttatttttaaggtttttattttgagttttgaattgttaaaataaataaaaatatttaagtggggggggaatggaagtttatttggaagaggaaagagagtagttggtgttgttggagttatgagatttaggatatttttgttttttaagtttggatgtgttttttagggtagtatgttggtatggagtgggatggttgatttttataagatggaaatgattgtatgttggaaattgagatgttttaggggagagaagattttaatttaaaagaaaggatataaatttttaatgtgttaaatttgttgattgtaagatgttgtagtaatggttagtatttgtagtattaaatgggtatgtttaaggggtttgggttttgaaattagttatgttatttaaataaattttatttgagttttgtggttgaatgtttgagatttttagaagaagtttataaagattttgttggaaattgaagaggattttagatatgttaaagatatgttggttattatgtagagattagaatttttagtgttgagagttttggttgggagaattttatatttttaagaattagtaattaagggattttatttttttgttaaataggtatattattaaatttgatgggtatgttaagggagaagatgatttgggaaaggagttgtttagggagtaagtgttttgttgtagaggtagagattgttaagatggtttttttggggtttgaggtataaagttttttttagttattttagttataaggaggtgggaatgttgtgttaaattgtatttaagaagataatttataaggtaaggaatatggaagttagggtgtgttgggtaagtaagtagaggttgtttgttttattgaaagtggggttgttttggttttataagggtttagttttggttggtatatgttttttttgttatattagataggtgagattaagaagggaagatagaaagagattttattatttaatatgggtaaatatttataggaggttattttttaatttgtggtgtttagaaatttggtagggatagggtggttgtatggggagggatgttagagaatggagaatgagtttattttattggtttaaatttaatttttatgtggttttttttaaataaattataagtttagtgagttagttaggttagtgtagagagatatttttgtatgttagaggtagatttatattggttttttagtttgtttttggatggtttttttttattttaattataatgttgttgttaggttgatttttttaatatgtaaatatgtttttgttatttgtttgtttggaattttttaatggttttattaggtttttgttgattgtaatgaaaagttttgtttaattagaattattgaaagttgttaattaggagagtaatatgtttaggtttgtgttatagaaagaaattgagagagtagatatatagattatttttttggatttattagttatatatattaaaatggttaaatagtaatttaaatagtaaaataaataaaaaatttaattgtgtatatatatatattaa

SEQ ID NO: 918 - DNA, 2479 bp, Artificial Sequence
  chemically treated genomic DNA (Homo sapiens)
ttggtgtgtgtgtgtgtatagttgggttttttgtttgttttgttatttgaattattgtttggttattttaatgtatataattgataaatttaggaggataatttgtatgtttgtttttttagtttttttttataatataagtttgaatatattgtttttttgattaataatttttagtggttttgattagataagattttttgttgtagttgatagaaatttaatgggattattgaagaattttaaataggtaagtgataggaatatatttgtatgttagaagaattagtttggtagtagtattgtgattagaatgaaggggaattgtttaaaaatagattggggaattaatatggatttgtttttagtatgtggaaatatttttttatattgatttaattgatttattaagtttgtggtttgtttaaaggaagttatatgaaaattgagtttgggttaatagagtgaatttgttttttattttttagtatttttttttatgtaattattttatttttgttaagtttttgggtattatagattggaaagtagttttttgtaggtatttgtttatgttaagtggtggggtttttttttgttttttttttttggttttatttgtttggtgtgataagggaagtatgtgttaattaaggttagatttttgtgagattagagtagttttatttttggtaaagtaagtaatttttgtttatttgtttaatatattttagtttttgtgttttttgttttgtgagttatttttttgggtataatttaatatagtgtttttatttttttataattaaaatagttagagggggttttgtgttttaaattttaaggagattattttggtaatttttgtttttgtaatagggtatttgttttttgggtaattttttttttaggttatttttttttttgatatgtttattagatttaatagtgtgtttatttggtagaaaaatggggttttttggttgttgatttttaggaatgtgaggtttttttagttagagtttttagtattaaaagttttagtttttgtgtaatggttggtatatttttggtgtatttaaaattttttttagtttttagtagggtttttataagttttttttgaaggttttagatatttagttatggaatttaagtggaatttgtttggataatgtgattgattttaaagtttggattttttagatgtgtttatttggtgttgtaagtattgattattattataatattttatagttaataaatttgatatattaaagatttatatttttttttttgggttaggatttttttttttttaaagtattttagtttttagtatgtaattatttttattttatggaaattagttattttgttttgtgttagtatgttattttgggaggtatatttaggtttgggaaatgggggtgttttggattttatgattttagtagtattagttgttttttttttttttttaagtagatttttgttttttttttatttgggtgtttttgtttgttttagtaatttagagtttaagataaagattttaaagataattttgtgtgtttttttttttttaggtatttgtataggaattagaggagttaattttgtgagtatattttaatatttgtttttgtttttttttttttttttttatttgttttaggggtttaaagtataagtttgttgttttttttgttattttgtttttttattttaggttattagagtgtatgtagagtttatggttttttttttaatgaagtggtggttttttttgaaaattagattggttttagttttagtagttgtagttagtttatagtatagatgtgtattgttttaagattttgtattttattgaggtgttttataagtttgtattttattttagagtgttaattatgtaagaagtattattgtttttattttttataatgaaaatggattttagtttttattttgttaatttagaggaaaattttatgttagtaagatttaggtgttttttttttttttatggagtgtgttttaggatttggagatttttatggtttttggaagatgaggaatttatttttgatttttagtttattaaagtagtgatttattgaatttttgtagttgtttgttttagggttgttagtgagggttggaaattttttgttttaggtttggttttttgaggtatattttttatgtagttgtttttttaaggattttatttattgttttagggaatagaggggtgttagggtttttattgttggggattgatatatttttttattaggttttgggatggggggttggttatggggggatggaagggagagtgttattttggtagttttttttttgttttttttttttgttttttagaagtttagtagaattttttttttgggtttagatattgttaataaagatagatttttttagaatgtttttgtttttagttggatga

SEQ ID NO: 919 - DNA, 2243 bp, Artificial Sequence
  chemically treated genomic DNA (Homo sapiens)
aaggtgttttgttaagtgattttggggagagtagttttttgttttagttttatttttttttgttttagtttttaagggtattgtttattttagttttattttagggttttaaaattggtttttatgtttttgtttttttttttttttggttttttttttttttttttttttttttattaaatttattttttgggtattttatttttggttatttagattttttggtatttagtagtttatagtttttttttagatttgttaatgagttttgtttattgtaaagagggttattgatttttattaataatggaatttttagtgtttttttagtaattttagggatgttgatgtggggtttttgggaaataggatttgagtatgtgagttttagttttatagagagagggttagtgagtgttgggaggggattgtgtattgtttttaagttgtatattttgttgattatttaataattttttttatatttgtataatttttttttatttttatatttttttgtttattatttttagatttatatatgatttaagtaataaagttttatttgtaaatgggaaattttttaattagagggtgagggtgatttgtttaaggttatatagtaaaatgtattttttaatattgagaagttagatattgatttatataggtattaaggaagttggggaagtttttttttattattgttagtaggtttggttttttaattttgttattatgtttggtgtatttgtgaaatatgttgattatgtttattatggattttttagtttgagtgttgtttatttttgtttttaaaaagtttttaggaaataaagataattatttttttttttttatttaagttagggtttttatttgggagtgttggaaggagggttgaggatagagtaaaaatatggataaggtgtagtagaatgaatttaatttttttttaatgtgatgggataagttgtttaaaaatgagagggtaggattaagtttgagatttggtttattttggttagggttaagaggagatgtaggtggatggtggaagtttagttgtggatagtgttttagagagggagaagtagggagagttgggtgttagtaatatatggaagaattaagttgggatattttagttttagttagtatatggtagattttatttttaaaagagtattaaatttattttttttagttttatagttggggtgatagttatgggggtaggataatggttttggtgatttggtgtttgattttttttggttgttttaggaattagatattgtgggttttattttgatttaagtgtaagttttgtatgatatggtgtgtgtaggttttaggtgtatatgtgagtgtggatgtgagtgttagtaggaaatatagttttgttttgagtatagggggttttttttgtatttttttgggaatgagaaataggaatggtttttgttataaggaatagaaataattttttggtttttaagttgttggatggggtgggagtgaggtgggagttattttatgtttgtttttgggaattatttgtattttttgaattattaagttttgattgtttaaataaaaatgtttgattttttaaagtagattttttagttagtagttagtttgggttggtttgtattttaagtttgaaaaataggatagtgtagtttttattttttatattttttaaagaattaggaaaggattttggttaatgtatatgggtgtttgataataaatttttaatattttttaatgtaggagaaagttttatgttggtaattgattaagaggagttatttagagtttttttgaatttgaggttaaggttagagggtaagttttgtgtttagagggtgattgataatttgtaggttgtggtagggagtgatggagtgttggttttttaatattttatttaggtaggggtaagttatttggttagggttatgttgtgttggggttttaggtttgggggtttggagagtttttaaagtatttataggggatttttagttttttattttttgtggagttggagttggggaggggatttagtaattgggattttaataggaggatgaatttagggaggaagaggatagggagggttttgtgtttaggttttattggggatatttttataggagttgttttaggagattttaaaggagtaatggataggtttggtttagttatttggttatatagatgtgggtttt

SEQ ID NO: 920 - DNA, 2243 bp, Artificial Sequence
  chemically treated genomic DNA (Homo sapiens)
aaagtttatgtttgtataattaggtggttgaattagatttgtttattgtttttttgggattttttgaggtaatttttgtggaaatgtttttagtgggatttgagtataggattttttttgttttttttttttttggatttatttttttgttggggttttggttgttaaattttttttttagttttagttttatagagggtggagggttaggggttttttgtgaatgttttggaggttttttaaatttttaggtttgggattttgatatagtatagttttggttagatggtttgtttttatttgggtaaggtattgagaaattaatgttttgttattttttattataatttgtaaattgttagttattttttgggtatagggtttgttttttggttttggttttagatttaaaaaagttttgggtggttttttttagttagttgttggtatggagtttttttttgtattgagaggtgttgggggtttattgttagatatttatatgtattagttaaggtttttttttggttttttggaaagtgtgggaagtgagaattgtattgttttattttttaggtttggggtgtaggttagtttagattgattattggttgaaagatttgttttgggaagttagatatttttatttaaatagttaaggtttggtgatttagagggtgtagataatttttaagagtagatatgaagtgatttttattttatttttattttgtttagtagtttaagaattagagagttatttttgttttttgtaatagaggttatttttgttttttgtttttaagggaatataagaagggttttttgtgtttgggataggattgtgttttttgttaatatttatgtttatgtttatatgtgtatttggagtttgtatatattgtgttatgtagggtttgtatttgagttaaggtggggtttatggtgtttggtttttgaagtagttgaggagggttagatattagattattaaggttattgttttgtttttatgattgttattttgattgtgaagttggaggagatggatttggtgtttttttaagagtggggtttgttatgtgttggttgaggttggggtgttttagtttagtttttttatgtgttgttggtgtttgattttttttgtttttttttttttgaagtattgtttatagttggatttttgttatttatttgtatttttttttggttttggttaggatgggttaggttttagatttggttttatttttttatttttgagtaatttattttattatattaaaaaaaaattgagtttgttttgttatattttatttgtgtttttattttgtttttagttttttttttagtatttttaaatagagattttaatttaaatgaagggaaaaaaatgattgtttttattttttgaaggttttttgaaagtaaagatgagtaatatttaagttgagaggtttataataggtatgattgatatgttttataaatatattagatgtgatgataagattgagaagttaagtttgttgatgatgatgaaggagaatttttttaatttttttagtgtttgtgtgagttggtgtttagttttttaatgttggaggatatattttgttatgtggttttggatagattatttttattttttgattaaaaaattttttatttgtaaatagggttttattatttggattatatgtgaatttaaggatggtaggtaaaaaagtatgaaaatgggaaagagttatatagatataaaggaggttattagatggttagtaaagtgtgtagtttgagggtagtgtatagtttttttttagtatttattgattttttttttgtgagattgaaatttatatgtttaggttttgttttttaaaggttttatattaatatttttgagattattgggaaagtattagaagttttattgttagtagaaattaatagttttttttgtaataaataagatttattagtaaatttgaaaaaaaattgtgggttattaggtattaaagggtttagatgattaagagtaggatatttagaagatgagtttggtggaaaaggagaagaaaggagaggaggttagagaaagaagagaataaaagtatgagggttaattttgaggttttggggtagaattaaggtaggtagtgtttttagaggttgggatgggaaagagtgaggttggggtaggggattgttttttttaaggttatttaatagagtatttt

SEQ ID NO: 921 - DNA, 2279 bp, Artificial Sequence
  chemically treated genomic DNA (Homo sapiens)
gatttgtgtataggagtggggtgtgggggtgtagggagtgtgggtaataggtatagattttgtttgtgtaatatgtggtaagaaattagttgtgaggggttggtttaatgtagagtggtgtgaggtttgtttggtatttataataattgaggggttagtttagaagtttaaggtggggttataggttggggaggaattgttaaattgtggatttttttttatttgttggaataagttttaggtaaaattttgttaataaaaattggtttaattgattttagatgaaagtttaaaagtagtttaatgtaggatagataattttttttataaatgatattgaaaagataggatatttatagatttttttttgttaaaaataatttttatataaaaattaagtggttagatataattgtgatgagtaaaattataaaatggttttaaaaaataataaattattgtttaaggttaggtaaaaggtttttaaattgatattagtggtaagattggtaaaaagaaatgttgatgaattagattttataaatttaaaatttttgttttgtgaaagattttgtaatgatattgaaaaggtttatttaggagaaaatatttataagttatatatttggtatataattagtatttagaatatgtaaataatttaaaaattaattatttttaaaaatttaattagaaaatagttagaagatataaatagatattttattgaagatatgtagatggtaaataattatatgaaaatttttaatgttattagttattagagaaatgggaatatgaggtttttgttgttttttgttttttattagggtgggttgagggtttggttttagtagttttgggtgttttttattttttgggtgtaatgttattattttggtagaatttttgttgaatttttgtaggatgttttattgggtttgttagtggttaggaagtttgattgtgttgtttttttttttttttgtgttttttattgttagttttttttttaaatgtgtttgtgtttgttttttatatttttgagttttgtttggttttttttttttttgtttgtgagtgtttggtggtggatgtattgaaagttgtgtattattgtttattgagtgttttggggagtgtgtggaagttgttggtagtaggttttgatagtagtattttatgggtttagttgttgatggtagtatttggttttgtgtgttttagttagttgaggttagggtgtgtggtgtgggttattggtattgtttttttgttattataatttttttttttattaggtatttggtgtgtagaagtttaaagatttgtgaggtttagtttggtgtttgtaattttagagaataaggaggttgaggttaggagttagagattagtttgggtaatatggggagaatttgtttttattttaaaaaaatttagtttagtgtggtggtggttgtttgtagttttagttatttgggaggttgatgtgggaggattatttgagttttttatattaaggagattgaggttgtagtgagttgtgattatagttattgtattttaatttgagtaataaagtgagaatttgttttaaaataaattttaatttgattttggtatagtattatatgataggtagtagttttaagggtgattaaagtattttattttaaaatatatttttgatatattttggaatggttttgtgtaaagttattttttgtgagggaaatttgtgttttgtggataatttttttttttttttaggtttttttttgatttgggagagatttaattaagagtttgatattgtttaaggttatttattttttgaggtatatatgttatttattttttttgaagtatattataggttttatatatgtaataagaattttggtttttataattttttttttgttattattggttaaatttttttttttttaaaatgtattggttttttaggttaaattaatgtatattttatatatattgattgatgtttttgtttgtattttttgtttttttaaaatgtataaaagaaaattatagtttaaatattttggatatatgtttttaggattttttgatgttgtgttataggttgtggttatttatatttggtttagaataaatttttaaatattttatagagtttggttttttttattgggtttttttatttattttattggtattagtttatattttttttgtttaattatatttttatattgttgtttatattttattaattttaagttaaaaat

SEQ ID NO: 922 - DNA, 2279 bp, Artificial Sequence
  chemically treated genomic DNA (Homo sapiens)
atttttaatttaggattaataaaatatagatagtaatgtagaaatatgattggatagaaagagtatgagttaatgttaataaaatgagtggggaaatttagtgaaaaaagttaaattttgtaaaatatttagaggtttattttgagttaaatatgagtgattatggtttgtgatatagtattaggaggttttgagaatatgtgtttaaggtgtttggattatagtttttttttatatattttaggaagatagaagatataggtaaaaatattagttaatatatgtaaggtatatattggtttgatttggaaagttggtatattttggaggaggaggggtttggttagtggtggtaggagggaggttgtggaagttagggtttttgttatatatgtgaagtttgtaatatgttttagaaagaatagatggtatatgtattttaaaaggtaaatgattttaaatggtgttagatttttagttaaattttttttggattagagaaagatttggaaagggaaggagattgtttatagaatataaattttttttgtaaaagatagttttgtataggattattttaaaatatgttagaaatatattttggggtaaaatattttgattgtttttagggttgttatttgttatgtgatgttatattagaattaggttggaatttgttttgagataggtttttattttgttgtttagattggagtatagtggttgtgattatggtttattgtagttttgatttttttgatgtgggaggtttaagtgatttttttatattagttttttaaatagttgggattataggtggttattattatattgggttaaatttttttaaagtagagataagttttttttatgttgtttaggttggtttttaatttttggttttaatttttttattttttaggattataggtgttaggttagattttataggtttttagatttttatgtattaggtatttggtagggggagggattatagtggtagaagagtagtattagtggtttatattatatattttggttttagttggttggggtatataaaattaggtgttattgttaatgattaggtttatagggtattgttgttaaaatttgttgttaataatttttatatattttttaaaatgtttggtaggtggtggtgtgtagtttttaatgtatttgttgttaggtgtttataggtaagggagaaagaagttagatggagtttggagatgtggagggtagatgtaggtgtatttggaaaagggattggtggtgggaggtgtagagggaaaaaggaatgatataattgggttttttagttgttggtggatttgatggggtgttttgtgagggtttggtgagggttttgttaggatagtagtattgtgtttaaggagtgagaggtatttggggttattggagttagatttttaatttgttttagtgggaggtgaagaataatgaaagttttgtatttttatttttttaatggttaatgatattaaaggtttttatatggttatttgttatttgtatatttttagtgaagtgtttgtttatgttttttgattattttttaattggatttttaaaaataattgatttttgagttatttatatattttagatattggttgtatgttagatatatggtttgtaaatatttttttttaggtaaatttttttagtattgttatagggttttttataaagtaaaagttttaaatttatggagtttaatttattaatatttttttttattggttttgttattaatgttaatttaagaattttttgtttagttttagataatagtttgttgttttttaaaattgttttgtaattttatttgttatagttatatttagttatttaatttttatgtaagggttatttttggtgggggggaatttatagatgttttgtttttttagtattatttgtggaaaagattatttgttttgtattaaattgtttttggatttttgtttaaaattagttggattggtttttgttggtaaagttttgtttgaagtttattttaataggtgagaaaaagtttatagtttaatagtttttttttaatttgtaattttgttttgaatttttggattagttttttgattgttgtagatgttaagtggattttgtgttgttttgtgttgggttagttttttatagttggttttttattatgtattgtgtaagtggaatttatgtttgttatttatattttttgtgtttttgtattttgtttttgtgtgtaagtt

SEQ ID NO: 923 - DNA, 2407 bp, Artificial Sequence
  chemically treated genomic DNA (Homo sapiens)
gggtgagtgggtgtgtgtggggtgtgtgtggtagagtgtgttagtgagtttggagtgtggagttgggaggagtagtgagtgttgtgtagaatttgtagtgttggtttggtagggtagtttggaggtgggtgggttgtgttgttagtttgtttgtagggtttttattggttgtttgttggttgttttttgtttaaaaggtggtaaggagttgagaggttgttttggagtgtgaggaggatagttggattgagttaatgttggggattttgttttttttgtggaggggatttggtaatttgtagtggtagggtttggggttggtgtttgggagggatttgtgttttttatttattttttagttgtgtttttgttgttgttttggttagtttttggtgttggtgtttatggttggtttttgatagtgttttggagggattgggggagtttttaggtgtttgggtgagtagttaggtgtggttttttggtttttttgatttttggtgttagtttttgtttttttagttagggtgtggtggggtttgtttgggtagtgttttgagtaattgggaaggttaaggtggagggaaatttggttttggggagaagtgtgattgtagttgggaggtttttttagttttgtgggttgggtgagaataggtggtgttggtttgattaggtgttttgtgttggggtgtgaggatttggagtgaattgttgtgttttggtgggttgttttttttttttttttgtttttttgggtggttgtatgttgggttggttgggtaatggagagggagttgttaggaatgtggttttggggattgttttgtttggggaaggggagagggtggttatggtgttaggagaggtgtgggagttgagaggtggtgtgggggtgttattgttgttgtaggttggagagagattgtttttagtgaggtgtgtattgtttgggtgagggttttatttttttgtggtgtttttggaggtgggaaagttgggtgggtatgtgtgtagagaaaggggaggtggggaggttagttatttttggagttggttttgattttaatagattgtttagtgtttggggatgttgattttggggtgttgtggtgtttggttttatgtgtgtgtggggttgaggggttgggggtgtttttggttgtttagttttaataaagggtgtttttttttattttgtgaggaggggtagttttggagatttggtttttagtgagtggggttttagtgttggggaggtttatttttttttggggttgttattttattattattattgttttttttttttttttaaaaggattggagattgatgtatgagggggttatggaggtgtaggagtggtggtgatggtttgggaagtggagttgaagtgttttgggttttggtgaggtgtgatagtttattatgattgtgtttaggtaggaaaatgtggatgattattatgatattggtgaggaatttggtaggtaaagggggtattagaagtgtatttttttggattgtggaaatgtataatgatggggttattgggtggtaaataaatgtagtttgaattaggtgttttttttgttttttttggagatgtgtaaattatagagaaaagagttattaatttagtggtaaattgtttgatttaagggtttgggggtggaggagaggtagtagtttagggttagattatgatgtatagtatattgatttagttttttggataaaattagatttaattgtttgtgttaatttttgttagtttttgtttttttgtgataataggataaatattaagattataattgtaattggagttagtttttatgtgtgatttaaatggagggtataaattaattaataggttttaaaaattttagtattttattttttatttaaatttttagtgtaatttgagtaagtattggtaggtggtaaatggagatttgttagatgttgatattgggtttggattttgaaattttttttaattaggaatttaattatttggttggtgttggtggttgttttggttttatttataatgttaaatttttaataaattaatgagagtttaatatggttatttggatttagagtatatttttattgttgtagtagttgtgatttttagtgtaaaattttttagtttttaggtaaataaagaatagttttttttggggtatttaagggttgattgttgttttttttgattgtgtattagatagagtgttttgggttttggttaattttagtagaaaatttagtttttatatatatatttaaaattgaatttatggaatttgattgtggtgtatttatattgtgagtggagtaggtaaaaggatttttaaataaataaaatatgtatttatttatatgtgtattgaaata

SEQ ID NO: 924 - DNA, 2407 bp, Artificial Sequence
  chemically treated genomic DNA (Homo sapiens)
tattttaatgtatatataagtaaatatatattttgtttgtttaaagatttttttgtttattttatttataatgtaaatatattatagttaaattttataaatttagttttaaatgtatgtatgaaaattaggttttttattaaagttgattagagtttaaaatattttgtttaatatatagttaaaggaaatagtaattagtttttagatgttttgaaagaaattattttttgtttatttagaaattgaaagattttatattgagaattatagttgttatagtaatggaggtatgttttgaatttagatagttatattagatttttattgatttgttaaaaatttaatattgtaaatgaaattaaagtaattattaatattaattaggtaattaaatttttggttggaagaagttttaaaatttaagtttaatgttaatatttggtaagtttttatttattatttattaatatttgtttaaattatattgaaaatttagatagagggtaaagtattaagatttttaaaatttattaattagtttgtattttttgtttaaattatatataaaagttaattttaattgtaattataattttagtgtttgttttgttgttatagaagggtaagggttgataagagttagtatggataattaaatttgattttgtttaggggattggattaatatattgtgtattataatttagttttgaattgttgttttttttttatttttaggtttttggattaggtggtttattgttgggttagtaatttttttttttatgatttgtgtatttttagaaagggtgagggagatgtttgatttaaattgtatttgtttattatttaatggttttattgttatgtatttttataatttaggagggtatgtttttggtattttttttatttgttaagttttttgttggtgttgtagtaattatttatgtttttttgtttgaatatggttatgataaattgttatgttttattaaagtttagggtattttagttttgttttttagattattattattgtttttgtgtttttgtagtttttttatgtattagtttttagtttttttgaagaaaaaaaaaaggtaataataatagtaaaatggtaattttaaaaggaagtagatttttttggtgttaagattttgtttgttgaagattgggtttttggagttgtttttttttgtggggtggagaggagtattttttgttaaagttgggtggttagggatgtttttgattttttagttttgtgtgtgtgtggggttgggtattatggtattttgaggttggtgtttttaaatgttgggtggtttgttgggattagaattggttttggaagtgattggtttttttgttttttttttttttgtatatatgtttatttagtttttttatttttagggatgttgtggaagaatgaagtttttgtttagatggtatgtgttttattgggagtaatttttttttagtttgtggtaatggtggtatttttgtgttattttttggtttttgtgttttttttaatattgtggttattttttttttttttttgagtgaggtagtttttagagttatatttttggtgattttttttttgttatttggttgatttggtgtgtggttgtttgggggagtaagggagggaagggagtggtttattgaggtgtagtagtttgttttagatttttgtgttttgatataaagtgtttggttgggttggtgttatttgtttttatttggtttgtggggttggggaagttttttggttgtgattgtatttttttttgaagttaagtttttttttgttttggtttttttagttgtttgaggtattgtttggataaattttattgtgttttggttgggaaagtaaaagttggtgttgggggttggggggattggggagttgtgtttggttatttatttgggtgtttgggagtttttttggtttttttggagtgttgttggaggttgattataggtgttagtgttggagattagttggggtggtggtgggaatatagttagggagtgagtggggggtgtagattttttttaggtgttggttttagattttgttgttgtgagttgttgagttttttttgtggagggaataaagtttttggtgttggtttggtttggttgttttttttatattttgaagtagttttttggttttttgttgttttttgggtggagggtggttggtaggtggttaatggggattttgtaagtgggttggtggtgtggtttatttatttttgagttgttttgttaggttggtgttgtgggttttgtgtggtgtttgttgttttttttagttttgtgttttgggtttgttggtgtgttttattgtgtatattttgtatatatttatttgttt

SEQ ID NO: 925 - DNA, 2485 bp, Artificial Sequence
  chemically treated genomic DNA (Homo sapiens)
ggggagagtattggtagtataaggtaaatttttggtatagagagtaaagtttttattgggaggatttttaaggggttatttgggagagggtagggtagtagttaattttttttaagtgggttgaagtaggtgaagaaagtggtagaagttatgtggtggtaaaaaggagttatatattttatttggagatgttttgaagtaattgtatgaaatttgaggatggttaggtagttttataatagttgtttatagggagagttagaatatagaagaatttagatgattggtagtattattttttttataattttaggtttggggggttgtgatggagttagaggaaatttagtttagaatatttttggtttttataaatataaattaattggaatgttaaattttagtttgttaatttggttattgaaaaaaaatttttttttttttaaaaaatatagttttagtttattttttttttttttgtaaaattttgtgtatgattttagttttattttttgttaagatatgttaaagtgttgagttattaataaaagaaaaaaagaaagtaaaggaagagtggttttgttttttagtgttagttttaatgatgatttaagttgtatttttttttttagttgtgttttgttatgttaaaggatgttatattgtataattttaataaggtttttaattagttttatttgttttggttttatttttattttttaataaagatttattaaatgtgggatttttttatgagttttaatattagagttttaatttttaataaatataggattggagatgtttgaggtttattttgtttttgagtttattgggaatgaaagagaagttttattttttttttaggagtttagttatgaattttttttttataagtaagtgtaggaaatttttagttttggaattgttagtggtggttgagttttgtgtgagggaggggtgtgtggtttagggagggttggtgggtggttagtagtagaggtaggtttttagttgtgttgttagtttatttttgtgtttgtttttttttggtataggtgtttttggtttagttgttttttttttggggttgtttttggtgttgtttgttgttttttttgttttagtatttttaggagaagattttaaagatgtagttgttttatatagatagttatttatttttttagaatgaattgataaataaatttggtatatttttgatggtattttagttttgagaaaggaggtgggtaggtttggtgatggggttgaagggtttggtgtgtatgtgttttttttgtttttgtgtgtggttgggggttgtttgtattaggaggtttttgttgggttttagagtattgtagatttgaggttaatggggttgattagattgatttttgtatttattttttgttggtgttaggaagttttttttttttttggaaaatgtagaatgggtttgaaatttatgtttatttttggtatgagttgagggttattgttttttagggtttttttttttttttttaaaaaattaggtttgtgaagtttttttttgttttttgggttttggaaggattagaaaagtgttatttgaaaggtatgtttagttttttagagtagttgtagtattttttggttatgtaaatttaatggttaggattttttaaagttattttagttaagatttatattttagagtttattaaagtggtaaattataaataggttaaagtatttttttatttttaatgtaaggtattttggttttgtttggtagaaagaaaagaatataggaggggagattgggagtttatatttgaattttggttttgttaaattagttttgtgattttgggtaaattttttattatttttggattttattagtaaaattgggtgtggattaggtgattttatagattttttttgttggaatattttatggtttgaattatatttttttaattattgttaaaattgttgttattaagtatttattgtgtgttaggtattttaaataaatattgtgtttaatttttaaaataaatttgtaaggaaggtttttggagataaggaaattgagatttaggattaagtaatatatttaaagttataggtgagtttggaattgaatttaagtgtgtttttattttattggaatttgtttgttaggatgttaatgagttgtagttttattttttttagagatttttttggttgtggttgaataatgaaaaggttttttagtggtgtttgttttagggatatttaggtgataataattttggtatttttttttagatatgtaataagagtaatatgtgtgaaagtagtaaagaggtattggtagaaaataatttgaattttttaaagatggttgaaaaagatggatgtttttaatttggatttaatgaggtattaatttgttgtatttattttttattattttttaggtaaaattttttttttttgtatg

SEQ ID NO: 926 - DNA, 2485 bp, Artificial Sequence
  chemically treated genomic DNA (Homo sapiens)
tatgtaagagggagaagttttgtttaaggaatagtgaaaagtgagtgtgataagttggtattttattgaatttagattggaagtatttattttttttagttatttttggaaggtttaggttgttttttgttagtgtttttttgttgtttttatatatgttatttttgttatatgtttgggaaagaatattagaattgttattatttaagtgtttttaaaataaatattattagagggtttttttattgtttaattatagttaggaaagtttttaagaaaaatgaagttataatttattggtattttggtaagtaaattttagtggagtgggggtatatttgggtttagttttaagtttatttgtgattttaggtgtgttatttaattttgagttttagtttttttatttttaaaaattttttttgtaaatttgttttgaagattagatataatatttatttaaagtgtttggtatatagtagatatttaataatagtaattttgataataattaggagaatataatttaagttatagaatgttttagtaggaaggatttatgagattatttagtttatgtttaattttattgatggagtttagaggtggtagggaatttatttaagattataaggttggtttggtagaattagaatttgagtgtgggtttttaatttttttttttgtgtttttttttttttattaaataggattaaaatattttgtattgaaagtggggagatgttttaatttatttatgatttgttattttggtgggttttgaggtatgaattttagttggaatggttttgaggaattttagttattgagtttatataattaaaaagtattgtaattgttttgagaagttgaatatgttttttaggtggtatttttttagtttttttaaagtttgggggataaaaaggagttttatagatttaattttttggaaagggaaaaggaagttttgagaagtaataatttttagtttatgttaaaggtgggtatggattttagatttattttgtattttttagaaaggaaaggaattttttgatattagtaaaggataaatatagaagttagtttagttggttttgttggttttaaatttatagtgttttagaatttagtaaagattttttaatgtaggtagtttttggttatatgtaggggtaaggggaatgtatgtgtattgggttttttaattttattgttaagtttatttatttttttttttagggttgagatgttgttgaggatgtattgaatttgtttgttaatttgttttgaagaggtgagtggttgtttgtgtggggtggttatatttttggaatttttttttgggggtattggggtagggaaggtagtaggtaatattaggagtagttttagggagaaggtaattggattgaaggtgtttgtgttggaggggagtgagtgtaggggtgagttgatagtatagttgggagtttgtttttgttgttggttgtttgttagttttttttgggttatatattttttttttatatagggtttgattgttgttggtagttttagggttaaggattttttgtatttatttgtggagaaggagtttatagttgggtttttggaggggagatagagttttttttttgtttttggtgggtttgagggtagaatgagttttagatatttttagttttatatttattgggggttgagattttaatattgagatttatgggaaaattttatatttgataaatttttgttggagggtgagggtggggttagagtgggtggggttgattggaaattttattaagattgtgtaatgtgatgttttttagtatggtaagatataattagggggaaaagtgtagtttaggttgttattgaggttagtgttaagaagtagaattattttttttttatttttttttttttttttattagtgatttagtattttggtatgttttgataaagagtaaagttgaagttatgtatgaagttttataaagagaaaaaaaataagttaaagttatgttttttgaaaaaaaaaaaatttttttttagtgattagattaataggttagaatttagtgttttagttaatttgtatttgtaaaaattaaagatgttttgaattgagttttttttgattttattgtagttttttaagtttgggattatgaagaaggtaatattattagttatttgagtttttttgtgttttggttttttttgtgagtggttgttgtagaattgtttggttatttttaaattttgtgtagttattttaaggtgtttttaggtggagtgtgtgatttttttttgttattgtgtggtttttgttattttttttatttgttttagtttatttagaggaggttggttgttgttttgtttttttttaagtgattttttgggaatttttttagtgaggattttgttttttgtgttagaggtttgttttgtgttgttagtgtttttttt

SEQ ID NO: 927 - DNA, 2354 bp, Artificial Sequence
  chemically treated genomic DNA (Homo sapiens)
ttgtgtttgttgtttggtggttgttgttggtttggtttttttttgttgttgtttaggttgttgttggttggtgagattggtgagttggatatgttttgtattattttttgagtggtgatgtgtggttttgtgggtttggggtagaggagaagagtggggtgttttagtttgttagttttttttgtgtgtggtgttggtttgggtgatgtggtttgtggaggagagagtaggaggatggatgggagggatttttgtggggagggtgtgtgggggaggtggggagggaggtgggagggggaggggatggtgtggatggttttgaggtttaaaaagaaagtgtttaatggttggatgtatattttgttaggttttttggaaatggtgttggtgttgtagagtttgtgaggtgtttgggagttgggtgagagttgtagatttggaggtttttatatttttgtgtaggtggaaagtttgggggtagtagtgttattggtttgatgtgaggaggagggattttttgaagttttataggaaagtttttgttttttagttttttttttttgttttattttttttttttggggtttaataatttgtttttttaaattatttaaaaatgatttggtttgggtggttggtttttttatttgttttttagttgtttttttttttttttttttgttgtttttttttggtgggtgtggggtgatttttttttttgttggagtgtgtgggtagtgtttttgaattttagtgtagtttaggaagtggttggaggagattgttttggttgtggtggtagttttatttggagtggttgtgatagtagtaatggtaatagtttttatatagtgggtgatgttttattttgtttaagagttttttaggtttgtggggttgatttgggattgttggggttgggggggtggtgtggtgtggggtgggggggtatgttaagaaaagtgttaattgtggagtttatttaatggttaggtagatgaattttttggagttttaaaggttaaattgtggtggtttagtttggaggttttgggtgtttttgaagatgtggttgtgttgtgggggttgaggatttgtgttttggtttgtttttttgtttttttgggttttttttttttttttataatgatttagtttgatgttttttaatatttaaaggattatgttttggaaggtgtttgaaagaggtagaagtttattttttggtggaaggaaatttagtttatgggaaaggtagtagagttagaggggggtagtgtagtgtttttgttgtggttttaatagttggtaatgttaatttaagggagagattttgtggttattttatttttatttttaaattaggttttgtattgtgattttgaaaggttagtttgtaagagagtgaagtgggaatttgatagtgtttagatataggggttgtttgttttgagattttttttgttttagtttttattatttagggtatttagtggataattaggttttgtgagttttaattttaaatgtttggatatgttaatattttaagtatttttgtttgtaagttaaaatgaagagttttaaagagggtgttaatgtagattttggtaaattggaagtagtaaagttggtgaattagaaaggaagttgttttggataagaagtttattttttgtaatgttatatttgttttttttttgaaatgaattgaggtaaaataattgttttaggtttattttttatatggtaaagtaaaaagttggagttagtatatagtgttggggtgggggtagtgtttgggggtgatgagttttgtgtattgtgttggagtattttgtatataaggtttgtttatgggttttttagtatggatttgttggtgggaataattaattgagtaaagtgtttttttttgggttggagtaaggtttgtggttgtagatattttaagttgaaggtaagagtttaggtgaggtgtaggtaggttatgtggttgttttttgttgagatttgtagttttggttttggaaattttagggtgtggagttgtttgggttgattgaagggtttagttttttgggagaagtgagggtgagtgttatttttttagtgaggtgtaaataagattgtgtttttatgggagggataaattgtagagttgattttttattatttttatagaaatatttagaaagtgattatagtttgttaattggtttgtttagtgagttgttgttttattgtaaaattgtttgaaaattagatttgatttgatttttatttaattttagtagtattttagtagtttttaaaatagttatttttgtatttttgtgtttgtattttttgtt

SEQ ID NO: 928 - DNA, 2354 bp, Artificial Sequence
  chemically treated genomic DNA (Homo sapiens)
agtggaagatgtaaatgtaagggtgtaggggtgattgttttgagaattgttagagtgttattgaaattaagtggaggttaagttgaatttgatttttagataattttatagtaaggtagtggtttattaaataggttagttgataagttgtagttattttttgagtatttttgtaaaaatggtaagggattaattttgtaatttgttttttttatgaaagtatagttttgtttatattttgttggagaaataatatttgtttttattttttttaaaaagttgaattttttagttggtttaagtagttttatattttgaggtttttaagattaaagttgtgagttttagtagggaatagttatgtggtttgtttgtgttttgtttgggtttttgtttttagtttgagatatttgtagttgtgaattttgttttagtttagaaaggggtgttttgtttaattaattgtttttgttggtgagtttgtattgagaagtttatgagtggattttatgtgtagggtattttagtgtggtgtataaaatttgttgtttttaaatgttgtttttattttaatattgtgtattgattttagttttttattttgttatgtaagggatggatttgaaatggttattttattttaatttattttaaaaaggaaataagtatggtattgtaaaagatgggttttttatttaaggtgattttttttttggtttattaattttgttgtttttagtttgttaggatttatattaatattttttttggggttttttgttttaatttatagatagaaatgtttaaaatgttagtgtatttaagtatttggaattggggtttatgaagtttaattgtttattggatgttttagatagtgggggttggggtggggggggttttagagtgggtagtttttatgtttaggtgttattaaatttttattttatttttttataagttggttttttaaggttataatgtggagtttaatttgggggtggggatgaaatggttatagggttttttttttgggttggtattgttagttgttagggttgtagtaaaggtgttgtgttgtttttttttggttttgttgttttttttatggattgggtttttttttattgaagagtgaatttttgttttttttgagtattttttgaggtgtagttttttggatgttggggagtgttagattgggttgttgtagaggggaaaggagggtttagaagggtgagagagtaggttgggatgtaaatttttagtttttgtggtgtggttatgtttttagaaatgtttaggatttttgggttgggttgttgtggtttggtttttggaattttaaggggtttgtttatttgattattgggtgggttttgtggttgatattttttttggtatgtttttttattttgtgttatattatttttttagttttagtaattttaaattggttttatggatttagagggtttttgggtgagatgagatattatttattgtgtagaagttgttgttattgttgttgttatagttattttggatggggttgttattgtggttaggatagttttttttgattgttttttgggttgtgttagggtttgggggtgttgtttgtatgttttggtggggaaggaaattgttttgtgtttgttggaggaaggtgatggggagggaagggggagggtggttaggaggtgggtggaggggttggttgtttgggttaggttgtttttgaatggtttgggaggatgaattgttagattttgaggaagggaggtgggatgggggagggggattggaaagtggaaatttttttataaaattttgaaaagttttttttttttatgttaggttaatgatattgttgtttttaaattttttgtttgtatggaggtataagagtttttaagtttgtagtttttgtttaatttttagatattttgtgggttttgtagtattggtattgtttttaggaggtttggtggggtgtgtgtttagttgttgggtgttttttttttggattttggggttatttatattgtttttttttttttttgtttttttttttgttttttttgtgtgttttttttgtggaggttttttttgtttgtttttttgtttttttttttgtgggttgtattgtttgggttggtgttgtgtgtgggggaagttggtgggttgaggtgttttgttttttttttttgttttgggtttgtgaggttatgtgttgttgtttgagagatgatgtaggatgtgtttagtttgttagttttgttggttgatgatagtttgagtaatagtgaggaagagttagattggtagtagttgttgagtggtaagtgtgg

SEQ ID NO: 929 - DNA, 2430 bp, Artificial Sequence
  chemically treated genomic DNA (Homo sapiens)
agttgtaattttaatgaattgtgattatgttattgtattttagtttaggtgatagagtgagatgttgtttttaaaataaaaaataaagtgaaatttttgattggtataattttgtttttttattagttttatttttaaaaaaattatataagtaaaatatgtttttttagttattattttttaaattagattattttttgtaataattttatgggaattattttatgggagtatagttatttatgtttgtaattttagtattttgggatgttaaggtgggaggattgtttgagtttaggattttgtaattagtttgagtaatatagattttgtttttataataataataataataataaaaataaaaaaattaattgggtatgatggtgtgtgtttgtagtttatgttatttgggaggttgaagtgggaagattttttgagttaaggaggtagaggttgtaagtgagttatgatagtattattgtatttaagtttgggtaagagtgaggttttgttttaataaaaatttgtaaaaaattttgggagtattgtatggttgttagtgaataaggttataagataaaaaataggatgtttaattaaatttagttaaataagtgttgtatatttttagtgtaagtatatttaaaatattaatgaggtatatttatattaaaataaatatttattgtttatttgaaatgtaaatttaaataggtattttgtatttttatttgttaaatttggtaattttattagtattttaatatgaagttatgagggttgtttggatttatgttggtaggtaagtattaatttatttggttgttttagataggatagaaattattttttttaaaaaaattgtttattttgatgataggtagtaatgaagtatggaagaattttgattttttgaggaatttgtaattgatgtaagtgttataaatgttattttgattgattttttgttttttttatttttttttttttgtaattgttttattatttttttttttttaagttttgtttttttagttatttttaattgttgaggaattggttgtttaaaaggagttggtaaaagtgtttatgtggagtttagaggagtggaagtagttagatttgattgagagttgtaaagtgtggttggtttttgttttttggataatgattatagttttgattgttagtgttggttttttttgtgtgaggggatttgttggatttttgtaaatttaattttttttttattttgggtttttttttattgttgttttttttattttggattatgtttaagaagtaaggatatgttgtggtttttattggttgtttataaaggtggtggggtgggggtggggaagagggtgagagttaagatttttttttttttttttttgtttttgttattttgattttttaaggttttttatagtattatgtttttatttttaatttgaatatttttttaagttttttatttgtagtttttaattgggttttagtttttttatttttattgttttttttttttattttttttttttttttgtttttttttttaattttgtttttatttttagggttttattaattatatttgtgtattgtgatttagaggtatattttttgtagttgagaggggagttttgtgtttattgttatatgtttattagttatgaattgaataaaggaaggtttgattttttgggttatgggagtgaaggagtttgggtgataggaagtaagtggtttgttatgtttattgtttagttgttagattaattttgttttgaaaataatgattgttttataggttatttagtgtaaggaagataaaaattttttgggaatttattagtgggtttgttttttagatttggtagatgtaaaaagtaaagggggaatatgggtaaaggaaggtgggttttgtgtatgaaattttgagtaaaaatgaatagggattttagaaattattattattattatttaaaaaaaattttagtagattatatagtttagtaggggttgattttttatgttatgtttgggttggttttttgtattttaagaattgagggttttgttttttgattttaggttttattattggtgggagtttgtgtttttttttgggtagaattgaataagattttttaggaaaggtatttgtgtagttaattatagattatggtgtaaagtatgttttatatttttttttttaattttagttaattgttgtatatttgatagtttattttaatattgtattaagatattggttttgtgttggatagagtaaaagggagatggtatttttttttaaaagaataatttattttataattaagtatttaaatatttggttgggaataaatgattaattagaatagtatttttaggtattttgatatttttatttagaaa

SEQ ID NO: 930 - DNA, 2430 bp, Artificial Sequence
  chemically treated genomic DNA (Homo sapiens)
tttttaagtagaggtattagaatatttaaaggtattgttttaattagttatttatttttaattaagtatttagatatttaattatgaaataaattgtttttttaaaaaaaaatattattttttttttattttgtttagtataaaattaatgttttaatataatattgaaataaattgttaagtatatagtaattagttggggttagggggaggaatatgagatatattttgtattataatttgtaattagttatataaatgttttttttggaaaattttatttaattttatttaggaagaaatataggtttttattaataataaaatttgagattagaaaataaaatttttaatttttgagatataaaagattaatttaagtataatatagaaaattggtttttgttaggttatgtaatttgttgagattttttttaagtgatgataataatgatttttaagatttttatttgtttttgtttaaaattttatgtataaaatttatttttttttgtttatgttttttttttgttttttgtgtttattaaatttggaaggtaaatttattagtaggtttttaaggaatttttgttttttttatattgaatagtttatggggtaattgttatttttaaggtaaggttaatttggtagttaggtaataggtatgataggttgtttgttttttgttatttagatttttttatttttatgatttaggaagttaagtttttttttatttagtttataattaataaatatatggtagtgagtgtagggttttttttttagttatagagaatatgtttttaaattatagtgtatggatgtgattggtagaattttaggaatggagatagaattgggggagggggtaaaagagaaagaggggtaaggagaaaaaataatgggagtggagggattgaaatttaattaaggattatggatggaaagtttaaagaagtgtttaagttgggagtgagagtatagtattatagaaaattttagggagttaggatggtaggggtgggggagagagaaagaggattttagtttttgtttttttttttatttttattttattgtttttgtgagtagttgatggaggttatagtatgtttttattttttgaatatgatttaaggtgaagggggtgatgatagggaagggtttggaatgggaaagaaattgaatttgtaggggtttggtagatttttttatatgaggaaggttggtattgatagttggagttgtagttgttatttggaaaatgagagttagttgtgttttatggtttttagttaaatttgattatttttgtttttttggattttatgtaggtgtttttgttggttttttttaggtaattggttttttagtagttggaggtagttgaaagggtgggatttgagagggaagaagtgatagagtaattgtaggaagagaagaatggagggggtggagaattaattaaagtagtatttatggtatttgtgttagttatgggttttttaaagggttaagatttttttgtgttttgttgttatttattgttaaagtaaatgatttttttagagggaatggtttttgttttgtttgaggtaattgaatggattggtgtttatttattagtatgaatttaggtaatttttatggttttatgttaaagtgttggtaggattgttaggtttagtaaatgaaaatataggatgtttatttaaatttgtattttaggtaaataatgaatatttgttttagtgtaagtatattttattaatattttggatatatttatattaaaaatatatagtgtttgtttagttgaatttaattgagtattttgttttttattttataattttatttattggtaattgtatgatgtttttaaagttttttgtgggtttttattgagatagggttttatttttgtttaggtttgaatgtggtggtgttattatggtttatttgtagtttttatttttttggtttaagggatttttttattttagttttttaagtagtatggattataggtatatattattatgtttggttaatttttttatttttattattattattattattgtagagatggggtttatgttgtttaggttggttgtaaagttttgggtttaagtagtttttttattttggtattttaaagtgttggggttataagtgtgaatgattgtgtttttgtagaataatttttatagaattattatagaaggtaatttgatttaagagataatagttaaagagatatgttttatttatgtaatttttttaaaaataaagttgatagagaaataaaattatgttaattaagagttttattttgttttttgttttagagatagtattttattttgttatttaggttggagtgtagtggtatgattatggtttattggagttgtaatt

SEQ ID NO: 931 - DNA, 2500 bp, Artificial Sequence
  chemically treated genomic DNA (Homo sapiens)
ttaaaataagtagggttttttttttggggtattttatttttttttttttttttaaattataaggttttaatagaggagtaaattttatgtggttttttaattgttttaaaagtgattaattattaaattgaatgtgatgtgtattgttattttttaaggaaaattttgagtagttttgaaagatagaattataaaagggaaaaattatttttttagggttagtttttttataaaataaatttgttttggggtttttttttggaaaaatatatatagggttttaagtgtgtgtaggttgattggttatataattatttgaatttagttttgaaaatagtttttttttgtgtttttaatgtaaaggaataattaaaatttaaagtgtattttttttaattagttgaaagttttagtaatgtatggtattgtgggtatttaggagttaaaatgtttttatttataaaaaatgatttaaataatggtttgtgtttaagtttttatatttgttttgtagagaagttttggttggtagaggtaggatttgtaattttttgggttgtttgattttatgaggggtgaggtatgtattgtagtgatatggattatttgtgaagtttttgggtgggagttgtttaaagattaatttttttgggtttttgttattaaaagtgtttttgtgaatagtgtgattggaaatttgtgtgggttggagattgtggtgtggttgtttttttaataggtgatttgtttttttgtttgaggtttatttttatgtaaagagtttgatattagagtattttttgttgttaaatgttttttttagttttgagggagagagttatgtggagttggaagagtttattttgaagagaggggttttggggagttttttttaagatttagaggttttgtggttatttttgttgggttttgttaagatttgttagaaggaatgagttgtgtgttttagttagttggtttttgttataggaagaaatgtttttgtagtgggtttaattgtttttgggttgagtgaattttttgttgtataatttagtggtgtggattttgttttttgttattttgttgttgtgttgagtggggtgggaaagtttttggagttgttagttgtgtagtttgtggttatttagatttgaggtgtgggtgtttgtgaagggtttttgtggggtggttggggttgttggggtatgtagtgtgggggtgtggtttggtgatgttgtgggtggggatttggtatttgggtaggttgtgtgtgggtgtggggtgagggtgttgtggggattgggatgtatggtttgtgtgtgggatatggttatggaggatgtgggagtagttggtttggggttggagtttgagtttgagtttgagttggagtttgagtttgtgttggagttggaattggagtttaagttgggtgttggtatatttgaggtgtttttttgattttggattgatgtgatgggtattttggtaagttatttggggagggggtggtgtaggaagtatagtttgtagtagtttttttgaaattgggggttttttttttgtttatttattgggtaatttattttgtagaggtgtttttttttggttttagtttttagggggttaaatatatatagtataggattttaaattttaattaaaaaataattagttataggttttgttaaaaggtgttttttaaataattgggtatgatatttaatagtttaatttgggatatttgttgatatgttggtgtggaaaaggtgagaaagaggtttttaaaaagtagatgtaaataaatatttggttggtgttggattagggaaaaggttgatgttattgatgtttatttttttattatttgttgtgtgattataagagggaaaataaatatttttttatttagaattgttaaaatgtttgtttatttttttttgtagttttttaatttgtggagttataggatatttgttttatatgtttggggttaaaataataggatttattttgttaaatttgtgttgttatgtattttgaaatgtttagtgattaaaagtgtttttggatttggtatagtttttgggaagtagtttttttgtatggagggtgaagttttaatttgtttagggttgaatattttggggaagtaatagatttgttttggtggagttgtagttaggtaggtagattggaattagatgggtgaggtttattatagttagatattttaatttatatataaaagataattttagtttaaagatttggaatggttagatgtgtagattattagaaaagtttttagatttgttttgagattttatattttttgagtgggaggagatggagtgaaagtttttttttgggaatgataaattgtgtatagtttttagtatagtgattaaatttttgggttttaaagtaagttatattaggttaaatgttagttttttaattgattgtttatatgattttggttaagttatttaat

SEQ ID NO: 932 - DNA, 2500 bp, Artificial Sequence
  chemically treated genomic DNA (Homo sapiens)
gttgaatgatttggttaagattatgtaaatagttaattggagagttggtatttgatttagtataatttattttgaagtttaagagtttaattattgtgttaaaaattgtatatggtttattatttttaaagaagaatttttattttatttttttttatttaaaaaatataagattttaaagtaaatttagagatttttttgataatttgtatatttggttattttaagtttttaaattaaagttgttttttatgtatggattaagatgtttgattgtaataaattttgtttatttgattttagtttatttgtttaattatagttttattaaagtaaatttattatttttttaaggtatttaattttgagtaggttaaaattttattttttatatagaagaattgttttttagagattatgttaaatttaggggtgtttttagttattggatattttaaaatatatgatagtatagatttagtaaaataagttttattgttttagttttaaatatataaaataaatattttgtaattttataaattgaaaaattgtaaaaaaaagtaggtaaatattttggtagttttgagtaaggaaatgtttgtttttttttttgtggttatataataaatggtgaagagataaatattagtaatattagttttttttttaatttagtattaattaaatatttatttatatttattttttgaaggttttttttttgttttttttatattaatatgttagtaggtgttttagattaaattgttgaatattatatttgattgtttaaaaaatattttttgatgggatttgtggttggttattttttaattagggtttgaaattttatattgtgtgtatttagttttttaagaattagagttagagaaggatgtttttgtggagtgggttgtttagtgggtgggtgagaagggagtttttggttttagaggggttgttgtgaattgtattttttgtgttgttttttttttaggtaatttattaggatatttattatgttggtttagagttgggagaatgttttggatgtgttagtatttggtttgggttttggttttggttttggtgtgggtttgggttttggtttgggtttgggtttaggttttggttttgggttagttgtttttgtgttttttatggttgtgttttgtgtgtgggttgtgtgttttagtttttgtggtgtttttgttttgtatttgtgtgtagtttgtttggatgttgggtttttgtttgtggtgttattgagttgtgtttttgtgttgtatgttttggtggttttggttattttgtgggggttttttgtaggtgtttgtattttgggtttaggtggttatgggttgtgtgattgataattttagaaatttttttattttgtttggtgtagtaatagggtagtaggaggtaaagtttgtattattgagttgtatggtggggaatttgtttggtttagaagtaattaaatttattgtaaaggtgtttttttttgtgatgggaattaattaattaaggtatgtgatttgttttttttagtaagttttggtaggatttggtaggggtggttgtggagtttttagattttggagggagttttttgggatttttttttttaaaatgagtttttttagttttatatgatttttttttttgaggttaaagaaagtgtttagtaataaaaggtgttttgatgttaggttttttgtatggaaatgagttttggataggagaataaattgtttgttgaaagagtagttgtgttgtggtttttggtttgtataagtttttaattatgttatttatggaaatgtttttggtaatggaaatttgagaaagttaatttttaagtgatttttgtttaaaggttttataagtagtttgtgttgttataatgtatattttgttttttgtgaagttaagtgatttaaggaattataaattttgtttttgttagttaagatttttttgtaaaataagtgtgaaagtttgggtatgagttattgtttggattattttttatgagtgggggtattttggtttttgaatgtttataatgttatgtattgttagggtttttggttaattaagggaaatgtgttttgggttttaattatttttttatattagggatatagggaagggttatttttgaaattaaatttaaatgattgtgtagttagttagtttatatatatttggggttttgtgtgtgtttttttaaggggaagttttaggatagatttattttataagggaattagttttggagaggtgattttttttttttgtgattttattttttaagattatttagagttttttttggaaggtgataatgtatgttatatttgatttggtgattgattatttttgaaatagttaagaaattatatggagtttgtttttttgttagggttttgtggtttaaaaggaaaaaaaaaagtgagatgttttagggagagagttttgtttgttttga

SEQ ID NO: 933 - DNA, 2487 bp, Artificial Sequence
  chemically treated genomic DNA (Homo sapiens)
tgtgtttgttttttttagagaaattggaggggtagtagttagtatttttttgttggttttattaagtatagttaaggtttttaggatatggttattttttatttgtggaagtggttttgttggggtgggtgggtgttagttggttttggtttgggttagagatatttagtggtttaggtgggtgtggggttagggtgtagatgagaaggggtatgagggttttgttttgaggatttagtggtaagtattggttttgggtgtgttttagtttatttatttgtgtgtttatggtggtattattttttataaggatttgaatgatttgggggtggttttgttttgttattttttgtttttggttttgttttttttttggagggttgatgaggtaatgtggttttgttattggtttgagggggtgggttttaatagtttgaggtggggtttttgggggtttagtgttatattatttggttgtttaggtagtggtgtagagtgggtagtaggtaggtggtgggtgtttagatggtttttttttttttttttgtttttttagtttttgtttttttgttgggaggttgtttgttgagttttgtgttagtgttgaggtagttttgttgtgttttattttgttttgttgggtatttggagggtagtgtgttggaggttaaggttgttttgtatggtttggtgggtgagtgagtttgggttgtagtagttttgttggtggtgtgtatggtaattttggagaggtgagtagtagttttggtagtggtggtagtagtggtaatgattttttggtttgggtttattgtgtttttgggtagttggagtttgggggattggggtgttgaggtgtgtatatgtttgtttagttatttttaggatgttttttgtaattttgatattggtaagtgtttttggtgttttgtttgagttttatgttgtagttaggattgtagtgttgtttagggaggtagggtgagttttattttttttttttgttttaggagaggggtagatggggttggggtggagtggagaaatttgatgtttttgggtgggggtgttggtatagttgagaggggaagatgttttgtagaggaaatttatagtggttgagggagtttttggttgtttttgtttttttaatttaggttgtgaggtttttattggtttttttgatatttggaaaatgtttttatttattattaatggaggaagggttagaagagaagggtggggaaagggtttttaaaatttggaatgttaattaaagtgttgggaaattgaatagttaaaaaaaaaaaaaaaagttgtttgttatgtgtatggaaagttgtaggagaaatttggagtattttgagtttgtattattttttgtgtttatgaaatttattttttttattgagatttaatttagttgtaggttttttaggtaagtgttaattgagtttttgggattgttaagtttgggtggatttaagggggaaaatgaggagaaagttgtggtattgatttatgttttggaggtattgtgtttgagagtgttgatagttagtagaaggtgtgaggggttatttattatatagttgtgaaaatttataggaaggttattttttttttttttgaatgtgtgtggggagggggagaatgggtagtggaaaatagatttgttattaaaagaataaatttgttaagggttatattatggtgatagttttagattggatttagtgttttgagtagagagattttgtaaagagattttttattttttagtgtgtatggagggttttgagagtattttgggaggtttgtttgggagtgtttgggatatttgtgtttggatggttaaaggtggagtggtatttgggaaatatttttttttttttttttagtttataaagtgtgtaagtttagtggttttgttgggagagtgtgtgtgtgtgtattgggttgggttgggtggtggggtgggatagttttgttgttttttgtttgtgttgatttagaggtgaagaatggagtgtgtgtgttttaagtatagttataaaggagaaggaaattttttattgagttttgggtgagggattttattagtgtgttgtggtgaggagggggaggaggtaggagtttggtaggggaggtagtgagggttgggaggggtattgttggtgggttgggttgagtttagaggttagagtgggggtgtggtgattagaatgttagtgtagttggtagttgagggtgtttgtgtgatttgaggttatttttgtaagaggttttttggggtttgtatggtatattttttttttttttgggggaatttagttggtttaggatttgtggattgtttagaaagatttttttgggtagtttgaagattggggagggttttttttttttttttatttttatttatattttatttattttttttttttttattttagttggtaatatttttatttgattagtgtgggg

SEQ ID NO: 934 - DNA, 2487 bp, Artificial Sequence
  chemically treated genomic DNA (Homo sapiens)
ttttatattaattaggtgggaatgttattaattgggatgaggagggaaagggtaagtggaatgtgggtggaggtggaggagggaggaaaattttttttagtttttaggttgtttaaaaggatttttttaagtaatttataaattttgggttagttgggtttttttaggagaggggaggatgtattatgtaggttttagggagttttttataagggtgattttaggttatataaatatttttagttgttaattgtattgatattttggttattatatttttattttgatttttaggtttagtttagtttattagtagtgttttttttggtttttattgttttttttgttaagtttttattttttttttttttttattataatatgttggtagagttttttatttaagatttagtggaaaattttttttttttttatgattgtatttaaaatatatatgttttattttttatttttgaattgatataggtagagggtggtaaggttgttttattttattgtttagtttagtttagtgtatatatatatatttttttagtagagttattggatttgtatgttttatgggttggaaaggaggagagagatgttttttagatgttattttatttttagttatttaaatataagtgttttaaatatttttagataagttttttaggatgtttttggggttttttatatatattaaggagtaggaggtttttttatagggtttttttatttaagatattaagtttagtttggaattgttattgtgatgtgatttttggtaggtttgtttttttggtgataaatttgttttttattatttattttttttttttttatatatatttaagggggaaaaaaatagtttttttgtgaatttttatagttatgtggtgagtgattttttgtattttttgttggttattaatatttttaaatatagtgtttttagggtgtgggttaatgttatagttttttttttatttttttttttaaatttatttaaatttggtagttttagaagtttggttagtgtttgtttgggaagtttgtagttgggttgggttttagtgaaaagaatgaattttataggtgtaggagatgatgtagatttggagtattttaagttttttttgtaattttttgtgtatatggtgggtaatttttttttttttttttaattatttaattttttagtattttagttagtattttaagttttgggaattttttttttattttttttttttagttttttttttgttagtagtgaatggggatattttttagatgttaaaaggattggtaggaattttatgatttaagttaggaaagtaaaggtggttaggggtttttttagttattgtgagttttttttgtagggtattttttttttttagttatgttagtgtttttgtttaaggatattgagtttttttattttgttttaattttgtttgttttttttttggggtagaggaaaggagtggggtttgttttgtttttttaagtagtgttgtagttttggttgtagtgtggggtttgggtggggtattaggagtgtttattgatgttggagttgtagaaggtgttttgggggtggttgggtgagtatgtgtatgttttggtgttttagttttttaggttttagttgtttaggagtatgatgagtttgagttaaggggttattgttgttgttgttgttgttgttggggttgttgtttgtttttttaaagttgttgtgtgtgttgttggtggggttgttgtagtttgagtttgtttgtttgttgggttgtgtggggtaattttggtttttggtgtgttgttttttgagtgtttggtgggatgggatggggtgtagtgaggttgttttggtgttggtgtaggatttggtgggtggttttttggtgaaggagtaggagttggaggagtaagaggaggaggagaagttgtttgagtgtttgttgtttgtttgttgtttgttttgtgttgttgtttgggtggttgagtgatatagtgttgggtttttggggattttgttttgggttgttggggtttgtttttttagattaatggtagagttgtattattttattggttttttaaaaagggggtggggttgggggtaaggggtaatggggtggggttgtttttggattgtttagatttttatagggaataatgttgttgtgggtatgtgagtgggtgggttggggtgtgtttgggattggtgtttgttgttgggtttttggagtggagtttttgtgtttttttttgtttgtgttttggttttatgtttatttgggttattgggtgtttttgatttaaattagaattaattaatatttatttattttagtaggattgtttttataggtgaggggtggttatgttttagagattttgattgtgtttggtggaattagtgggggaatgttaattgttatttttttagtttttttggagagagtaggtata

SEQ ID NO: 935 - DNA, 5000 bp, Artificial Sequence
  chemically treated genomic DNA (Homo sapiens)
tgtttagaaggtaatatgtgtttttttgtgtgttaggtggagtgtattttaataagatattagggttttaatatatggttggagtggtgattaaaagggaaaatttagtttttagtttaagttttttagagatatttttgttaatttttgtatttttttatgttttattttatgtgtgagagtttgtaaaattattggggattggatttgatggtgagttttatgtttgggaatagttagtaattggaaggggaagtggataggggaattttaagaggtgagtttgttatgtgggaagtgtttgaatttgtgggtttttatgaatgtagagggtgttgggaagggggggtatttggttgtgattttttttgttttttttatttgttgtttttttttttgttggaatttttttgtaaagtaagatggagtagggggagggggagagggaaggggtgagagggtttttggtttatttttgagatgtgaggatttgttatttaggtattttttttggggtgggttgggttttgggatgattatttgttttttttttgtttttgttgtttttattttgggagatttagagttttggatgtttttttttggagaagggggggtgtgtggagttggggtggaagagattttgtttgtagagttatattaagtgatgtttagaggttgggagttttggtggtttttgttttttgtttgttgggttagatttatattttaaaaatattttttgtttttttttttttttttgtttttttttgttgtaattttttttgatttgtttaaaggtggtttaggtgaaattggagtaatttttttatgggggttttaaaatgtaagtgaatgtttttatttggggtgatttaaaagtttaagttgggaagtttaatgtgattaaaattaataggtgattgtttggggttgattgtgtgtgggtgtatatggtatttggtttgggtgttatttgtggtgttggattgttttattttgagtttgtaatttgggttttttagtgagttttttttttttttgaaagttaatggtttttatagtaattagatattttttttgtttgtttttttttttttttttttttatatataggagatgggatatttatttttgttgttattgataaggttggaggtggttgggtttttttttagtttttgtttgttttagtgtttgttttttttttgtttttttttggtttttttttgatgtagtggggaatgtgttttattaaaaaaaaaaaaaaaaaaaaaaaaaaaaagtaatttgtttggtaataattagtgtgtagtagtaggagttttagagttattggttatgtaaatagagggaggggagatggtgttttaaatttttttttatttttttaaagtgatattttttttttttttttttattattttttttgttttatttttgtttaaagaggttggttttggggtttgagttaattgtttgtatttttagtttatttgttttttttttttgttttgtagggaatttagtgtatggtttatttagtttgtgttttattttgttttgttggttttttgtgtttttgtttgggtttttttttttggtgagggaggtatttagttggttttggtgtgtttagagagtttgagttatgttatgtttgttgtatgtgttagtttggttagtatattagggtgttggtttttttttttttttttggagtgaaatatattaaagggtgtggtgggggtggggggtgatgggaggaaggaggtgaagaaatgttattagattgtattttttgtaaagatagttttgatttaagtatgtgttagagtatgtgttagggttgattgtgttggtggtgattttattgtagttggtttttagggagaaagtttggtgagtgaggtgtgaaattggaggggttggtgaggatgtgggtgaaggattgagtgtggaggttttatgtttttggggaaaggaaggggtggtggtgtttgtgtagggggagtgagggggagttggatttaattttttatttgtttttttttttttttgggttattttttagaaagttgtattggtgtggttatgtttagtgtagatattttgggtggtttgttagtagatgtaggggtgaggaagtgggttttttttgtgtggttgttggttgtgggggaattgttgggagttttgtttttggtttgtggtggttttagatgttgtattgtgttgttttatggtgtttgaagagtttttagaaatatgatggtttttgtttgaggattatattttatttttttagagaagtatttttttttttttttaatatttattttttttttttttttttttttttgtatatattttgtaggggggggtagaagggatgttgttttggtttttttaattggggtttttgaaatagttttgaagttattaggaatatagattttagggatatgatttttatttttgggtatgtgaggttgttattttttaaaattatttttttttttattttttatttaagggatttatttttaaattgtttgaggttattttatttttagataatttattttatatttttggattttaaatataagggtaggaggattaggatttgttttgaagaagttaaagttggagggttgtattttggtgtgttatatttatagaatgagtgaaattagagggtagaaataggagttggtagttttttgtgggttgttttgtttggggtttttggtatgtagggttggatggagggagaggggtggggggtggtgggggattgtgtttgaagttgggttgggttagttgttgttttttttaataatgagaggggaaaaggagggagggagggagagattgaaaggaggaggggaggattgggaggggaggaaaggggaggaggaattagagtggggagtgtggggagagggaggagagttaattgtttagttagtttgtgttattgttttagagtggagaagagtgagtaggggagagtgagattagttttaaggggaggattggtgtgagtgaggtagttttgaggttttgtttgtttattatttaatttttgttttttttttgttttattttttttttttgtttttattttttttttgaaaattttttatttagttaaaggaaggaggttaggggaatgtttttttttttttttttaaaaaataaaaatagaaaaatttttttttaggttggggaaagtaggagggagaggggttgttgggttggttatggagttgttgtgttatgaggtggatttggtttgtagggttgtgtgggattgtaatttgttttgagatgattgtgttttgtagaatttgtttattattgaggagtgttattttttgtagtgtttttattttaagtgtgtgtagaaggatatttaattttatatgtgtagaatggtggttatttggatgttggaggtaggttggggggtggtgtttgttaggagttaggatttttttggatgtttgggtttttggttggagttttaaatttgggagagggtaatttttgtgttggttttttggtttttgtgtgggagtttattgtgtgttttttggtgagatgtgtggttttatttttgtttttttttagataaattggggaggtagaggggggaggaaaatttgggagaagtgaggttgttttgggtgggggtaggggagtattttgtgtgtgtgtttttgtatgtggttgttttttttttttattttttttgtgatttgttttttgtgaagttgttgtggttgtttgtgttgtggttaggaagagagttggggtttgaaattgggattttgagtagaaaggtaattttttttaaaaggttagagtaaatttgttttggttttaggtttttgtttgtggttgtgattttgtgttggtattttattggggaggtggagggaggagggagaaggagagaaatggggaatttgggagttttggaagttttattgaagaaatgtgtgttttaggggaatttaaaagaattgttttttgttttttattttaagtttttgtttagtgagttgtgtgtttatgtatgtatagttttggatttgttgtggttttgttatgttgttttgtaaattttttttggaaaggttgggaaatgttgtttgtttatttttgtattttattattttggttattttatttttaattgtgtttttttttttattttttattttatgaagattatttatagtttggttttttagtttttttggtgtggagatttgggtggggtaggaagggggggagggggtgtgtgtaggggggatattgggttatttttgaaggagaggtgggagttttttgtgtttttttttagggttttttgtttttgtttttttttttgtttgttattgtgttttttagtttttgtttttgtgggttgtagttggatatttttgttgtggtgtttatttttttaagtttttttttgggatttaaagttttaggggttggaatatagatttttttggtatttgaaatttttgttttgggaagtttggtttttttttggggtttttatgttaaaagggtttttttaggatatttttttgatttttaattattttttgaaattatttttttttgttttgattttagttgttgaggttgtggtgtttttttttttttttttttttttttttttttttttatttttttttatttgtttttttaaaagtggtttttgggttgtagggatttttttagatattttttttaattgttgggaatgatagaggaggatttggggatttggatgagattaagaagtggatttttggagtttttagaatatttttattgattttttgaaaagatgatgaaatttaaaaaagagtgagtgagttagagtgtgtgaaggagtagttaaagggagtgttgtggagttgttgtggttgttgtgtatttttttgattttttgttttggagttgtagtttat

SEQ ID NO: 936 - DNA, 5000 bp, Artificial Sequence
  chemically treated genomic DNA (Homo sapiens)
gtgaattatagttttaaaatggggagttggagaagtgtgtagtagttgtggtagttttgtgatgttttttttggttatttttttgtgtattttaatttatttatttttttttggattttgttatttttttaaaaaattaataaaaatattttggaggttttgggggtttattttttggttttatttggatttttagatttttttttattatttttgataattggaaaaaatgtttgggggggtttttgtggtttaggggttgtttttgggggggtgggtgaggagaggtggggaagagagggggagggaggagaggaggaagagtgttgtagttttggtagttggagttggagtagggggggatggttttaaaaaataattaaaaattgaggaaatattttagaaaagtttttttggtgtgaaaattttaaagaagagttaggttttttgaaatagaggttttgggtgttagaaaggtttgtattttgatttttggggttttggattttgggaggaaatttgaaggggtgagtgttgtggtgggagtgtttggttgtggtttataaggatagaaattagggaatgtggtgatgagtgaggggaaagatgggagtagagagttttggaaagaggtatggggggtttttattttttttttaggggtgatttggtattttttttatatatattttttttttttttttttattttatttaaatttttgtattgaggaagttggaaaattaaattgtaagtaatttttgtgaggtggggggtgggggagagggtatgattagaagtggggtggttgggataatggggtgtgagggtaagtgggtgatgttttttagtttttttaaagggagtttgtaaagtaatatggtgaaattatggtaggtttagagttgtgtatatgtgggtatatggtttgttgggtaaagatttggagtgaggggtaagaagtggtttttttgggtttttttgaaatatgtgtttttttaatgggatttttggggtttttgaattttttgttttttttttttttttttttttttttatttttttggtgaagtgttagtgtggagttgtgattataggtggggatttgaggttaagatgaatttgttttggttttttggggggggttgtttttttatttggggttttgattttaggttttgattttttttttggttgtagtgtaagtagttgtggtggttttgtaaaagataggttgtgaggggggtgggaagaagaggtagttatatgtaggaatatgtgtgtgggatgtttttttatttttgtttaggatagttttgttttttttagattttttttttttttttgtttttttagtttatttggagaggaatagaaataaagttatgtgttttgttagaaggtgtgtggtaaatttttgtataggagttgggaggttggtgtggggattgtttttttttaggtttagggttttggttggggatttgagtatttggaggggttttggtttttggtgagtgttattttttgatttatttttagtatttaggtggttattattttgtgtatgtagggttggatgtttttttgtatgtatttgaagtaggagtattgtggaaggtagtgttttttgatggtgagtaggttttgtaggatgtggttgttttggagtaggttgtggttttgtatggttttgtggattgggtttattttgtggtatagtagttttatggttagtttggtggttttttttttttttgttttttttggtttggaaaaaggtttttttgtttttgttttttggaaggggaggggagagtgtttttttgattttttttttttggttaaatagggggtttttgggggagaggtgagggtagagagagaaggtggagtagaagggaggtgaggattgggtggtgggtgagtagagttttggggttgttttatttgtattggttttttttttaaaattggttttgtttttttttgtttgtttttttttgttttgaagtggtgatgtaagttggttgggtagttagtttttttttttttttttgtgttttttgttttggttttttttttttttttttttttttttggttttttttttttttttttaatttttttttttttttttttttttttttttttgttattaaggagaatagtagttggtttgatttaattttaaatgtggttttttgttattttttatttttttttttttatttagttttgtatgttaggggttttggatagggtaatttataaaaaattattgatttttatttttgttttttaattttatttattttgtaggtgtagtatgttaaaatatgattttttaattttggtttttttaaaatggattttaatttttttgtttttgtatttaagatttaggaatgtagggtagattatttgaagatggggtgattttagataatttagaaataggttttttaagtgaaaaataagggagggggtgattttagaaaatagtaattttgtatatttagagataaaggttatgtttttgaagtttgtgtttttgataattttgaagttgttttgaaagttttgattaaagggattagaataatgttttttttgtttttttttgtagagtgtgtgtagaggaagaagagggagggagaggtgggtattaggaaggaaggggggtgtttttttggagggatagaatgtgatttttgagtagaaattattgtgtttttgggggttttttgggtgttgtggggtgatgtggtgtagtgtttagggttgttgtaggttgggggtagggtttttagtggtttttttgtggttagtggttatgtaggaaaaatttgtttttttgtttttgtatttgttgataagttgtttgaggtgtttgtgttgagtgtggttatattgatgtagttttttaggaaatggtttgggagggggagggggtgagtgagggattaggtttggtttttttttgttttttttgtgtaaatattattatttttttttttttttggaggtatgaggtttttatgtttggttttttgtttgtatttttgttgatttttttggttttgtgttttatttgttaggttttttttttgggagttgattgtggtgaagttgttgttagtatggttggttttgatatgtgttttaatgtatgtttgagttaaggttgtttttataggagatatgatttggtggtgtttttttatttttttttttttgttattttttatttttattgtgttttttggtgtattttattttaggaggaaggggagagattagtgttttgatgtgttggttaagttggtatgtgtagtgggtatggtgtggtttgagttttttgggtatattgaggttgattgagtgttttttttattgagagagggggtttgggtaggggtgtggagagttagtaaggtggggtggggtgtgggttgggtgagttgtatattaggttttttgtaaggtggaggaggggagtgaataaattagaggtgtaagtgattaatttaggttttggagttagtttttttaaatgagggtggggtggaaggggtggtgggggggaaaggaggggatattgttttaaaagggtgaggaagagtttggggtgttgttttttttttttttatttgtatagttaatagttttggggtttttgttattgtgtgttgattgttattgggtagattattttttttttttttttttttttttttttttagtaggatgtgttttttattatattaaaaggaagttaagggagggtggagggagagtgggtgttggggtgggtgaaagttggggagaggtttggttgtttttgattttattaatagtagtgggaatgagtattttattttttatatgtaaagaaaggggagggaaggggtgggtgaggaaaatgtttaattgttgtggaagttattagtttttaggaagaaaaaaagtttgttgaaaaatttaagttgtaaatttaaaatgaaatagtttagtgttgtggatgatatttgggttgaatattgtgtatatttgtatatagttggttttgaataattatttattggttttagttatgttgggttttttgatttaagtttttgagttattttggataaggatatttatttatattttaagatttttataagggaattattttaattttatttaagttatttttgagtggattaaagaaagttgtagtggggagaggtgagagaaggagggagggtgggaggtatttttaaagtataaatttaatttgataggtaagggatagaggttgttggggtttttagtttttggatattatttgatatagttttgtgagtaaggttttttttattttgattttgtatatttttttttttttggggaaaggtatttagagttttgggttttttgaagtgggggtagtgggggtgaggaagaagtgggtggttgttttggggtttagtttattttgaggagaatgtttgggtggtgagtttttatgttttgggagtgagttgagggtttttttgttttttttttttttttttttttttattttgttttgttttatagagaaattttagtggggaggggggtagtgaatgggaggggtagagagggttgtggttggatgttttttttttttggtgttttttgtatttatggagatttgtaagtttgggtgttttttgtgtggtaggtttgttttttgaagtttttttgtttatttttttttttgattattgattgtttttgagtgtgaagtttgttattgaatttaatttttggtggttttgtagatttttatatgtggggtggggtgtgagagggtgtggaggttggtaggaatgtttttaggaggtttggattggaaattgagtttttttttttggttgttattttagttatgtgttaaaattttaatgttttgttaaaatgtattttatttagtatgtgggaaaatgtatgttgttttttaggta

SEQ ID NO: 937 - DNA, 5001 bp, Artificial Sequence
  chemically treated genomic DNA (Homo sapiens)
ttaggaagtttatttatgggaaatttatatttatggtgttttgatgttgtagaggatattttgagttggttggagtaatttgggatataggttaattgattgtaatttaatttttgaggttatttagtattttttatagtggttatttaaaaaaaaggtagttaggtgtggtggtttaagtttatatagattttagaattttggaaggttgaggtgggaggattatttgagttaaggagtttgaggttagtttgggtaatatgaagaaattttgtttttataaaaaataaaaaaaattagttaggtatggtggtatgtatttgtagttttagttttttgggaggttgaggtggaagaatgatatgagtttagtaagttgttgtaattagttgtgattatgttgttgtattttagtttgggtgataaaaagaaaaagaaaatggagtttgtttattgggtgtggtagataaggtaaatttttttttattttttatattttataattttggatgtgtttatagttatggtagtgttttgtaatgatgtagttgatgataggtgtgatgttggagatttttttatttgattgttgttattagttttattagtttttaatgtttggtgtttgttttaaagggtatgttttaggagttgttttaaatttttaaagtattattttttatataaataagaagtgtaagtaagtagtttgagtttagttttttaataggaatattttattattattagattaagtttttttattataatgattgatttgtttttgaattttgtggatttattttttaaaatgttttttttttttagtttttatagttagtgttttaaaagtgatttgtagtattttttgttgagatgaatgtattagttttttaattagtttgtattttttttatttttttaagttagtgttagattattttgtttgaaaaattatttttagtgtgttttattttagtagaaatgttttttagtttttaattaataattatattaaatttttgtttttgtttgtgttttaagggtatttataggttgggtgttgtggtttttatttgtaattttagtattttggaaggttgaggtgggtagattatttgaggttaggtgtttgagattattttgattaatatagtgaaattttgtttttattaaaaatataaaaaaaaaaaaaatagtggggtgtggaggtgtatgtttgtaattttagttatttgggaggttgaggtaggagaattgtttgaatttgggaggtagaggttttagtgagttgatattgtgatatagtattttagtttgagtgatagagtgaggttgtgttttaaaaataaataaataataaattaaaaaaataagagtatttataatttggttttagtttgaatttttttttttattttaatatgtagttttagttatatttttttgatgtttgtaaataagtttagttttttttgttgtgaagttaagtttaggtggtttttttttgtttgattgtttttttattttatttattggaagtttagttattttttggagggttgtatgggggttgtaagaagtaatggaaatggtttagtatttgttattttttattatattttttttaataaaggggtaatttttgttaatggtagtgtagattttttaatttttatatatggaagatttatattatttaggattgttgtttaattgttgagagagtatttgatatttaatagtttattaggttataagatagtgtaggaaagaattttttgttgtttttttatgttattttgaatagttggtttatagagttattgtaaatatataaaatatgattgttagggtttagtagtgaggaaggtgggaattagttttgatttagttaattgtgtttaggagaagttgtttaattttaaaggattttattattattagaattaataatattaattttaggggtaaaaataaagataaatgtgtgtaaattttgtttgtagttttgggtatgttgtgggtgtttaagaattgtttttaggtagttggtggggataaagtttgtgtgttttttgttttggaataggttttaaggttggtttatttgtaaagtaagggtatggtgtaagagtattgaatatgggttggaagggtgttggttttatttttagtttataggttggttgggtggtgttgattagtagttaggttttgttttttttaggaatggttatgggggttttgggagggtatgaatgtttttttgtagtgaggtttttggattttgtggttttttggtagtgtaattaaaatttaggggtaggtgttgtagttgtttagtgtagttagatttttgttggtatttttaggggtggagttggaggtagggtttttgggttgtattaattttatgggggtaggggttgtttttttttggttgtgtgttatttaagtatggtagataggtagtgaggttgttgaggttgaggttagtttgtagtttttttttttttgtgttttgggtgtggggtgtatggtaagtgtgggtgggtgggataggtatgtagggtatttttggggttgggtgtggtgggtgtggggtggggtttgtggggggggggggtggggtggtggtgtttttgtggtgtagttggggttgtggttttgttttttgtgtttttttaaggtttgtgggtggtgtaggagtggtatttgtggttgtggtggttttggtagtggttttagtagattggtggtattagtggtagtattagtattagtagtatgttgagttgggtagtgtgtgggtgagaagaaaggggatttggttatggttttaagggtgaaggggtttgtggtgggtagggtttttgtggtaatggtgatagtggttgtattgggtttggtgggattggggtatttgtaggtggtttttttgggagtgtttggtgtggtggttggagtggggatttgtagggaggggatgtggggatttgggggatgttgtgtgttgttgttttttggtagtttagtttgtgtagatggttttgtggtgttgattgattgggttgtgtttttttgtttttagtattagtaggtagttggttttggttttggggtatttgggttttaggtagaagtatagtttttttgatttgttttatgattatggtgttttggaattttatattaatgtgtagattatgtagttgtattatagtaagtattatgtggtttatgtgaataatttgaatgttattgaggagaagtattaggaggtgttggttaagggtaggttttaggttgagtggtgggaggtagtttttggtagaggtgattttagggagttaggttttatatggatgggtttttttgtggaggagaatttgttttgtatttgtattggttttgagttttttaggtatgatagttttttttttaaatatatggtttattttattgtagaaggagtgttttgatgggtttgaatatatttttgttattttagggaatttggggttttgtgaaggagtttgttttattgttgtgagttatattttgttatatatattgttagtattggtgaattgtagggtttgaaaagaaagttttattgtgttatttgttttttttgtaaattgaaattgtttttgttgtataatgtgttttggggaaatgtttggttttttaggtaggtgtgttagttgtttgtaggagggttgagagtgtttgtttattggtggttagatattattgggtttgtaggtgtttttgagtgttagggttattttttgatagaagtgggagtggtgttttattgttaggttatattgaaggtgggagataggaggatattattttgtgttaggaattatggtttttgttatttttttgagagtaaatggggttgggattttagtttaggatttggagattttttgtatttttagttattttgtaggtgaaattttattgagtttatttgattttaggtgggagaggaggaggtatattgttgtggtgtgtgttattaaaaaagtagtaatttaattgtggaatagtttaggatttttagatttgatattttttttgattttttttaggggttaaagtttataaggaaaatagttttttagtgggaaattgaaataggtttgtttttatttattatttatttatatttgtaatgtaattaaaatatatgttgttaatttttttttttttttttaagagtttggttgataaaattaggggtatgtggattttttgagtttgtgttttttgggggtgtgtatgggaatgttatgttttaatgttttttataaaatagtattgtttttttaatttatttgttagtggtttgtataaggaagataattgatagttatgttttttagattttttgtattgtttggtaagttatgtagtaaaaaatgtttatttttttttaaatgttttgaattttggggttatgaaatttgttgagtaatttttagatagttatattttgttgattggaggtatttagtggaaaaatgtagtattttagtttgattgtgtttgaagtaaatgattaaaagaggaggaagttattatattttggaagatttatttgagatagatgaattttgaattatgggaaaaggttttgtgatttaggaaataataaatttgggaaatatgtaatggggagagattggggaatattttagttgtgaaagtattttttgtaaggtaatatttgatattaggaatttttttttttagtattttaaaaataatttaattttagttttttatttgtggaattagagttttatttatgtaatataatttattggaaaaaagttttttattgtattgtattatattgtttataagtgattgagtatttgtagagtttttttttatttaaatatattttaaaaattattaaaaagatttttatgtttgaaaatttggggaaaaaagataaaataatgttataattttatt

SEQ ID NO: 938 - DNA, 5001 bp, Artificial Sequence
  chemically treated genomic DNA (Homo sapiens)
gatgagattatgatattgttttattttttttttttaagtttttaaatatgaaaatttttttaataatttttaaaatatgtttaagtaaaagaaagttttgtaggtatttaattatttataaataatatagtataatataataaaaagtttttttttagtgggttgtattatataagtaaggttttgattttataagtaaaggattgaaattaagttgtttttaaaatattgaagagaaaggtttttggtgttagatgttgttttataggaagtatttttataattggggtattttttagtttttttttattatatgttttttaaatttgttattttttaaattatggggtttttttttgtaatttaaggtttgtttgttttaagtaaattttttagaatgtggtaattttttttttttttaattatttattttaaatataattaggttgaaatattgtatttttttattagatgtttttagttaataagatgtgattgtttaaaaattatttaataaattttataattttgaaatttaaaatatttaaggaaaagtaaatattttttattatgtagtttattaagtaatatagagagtttaaaaaatatgattattgattattttttttgtgtaaattattaatgaataaattaaaaagataatattattttgtaaaaaatgttaaaatataatatttttatatatatttttaaaaggtatagatttaaaaagtttatatatttttggttttattaattgagtttttgagaaaaaaaaaaaaagttaataatatatattttaattgtattataaatatgagtaaatagtaaataaaaataagtttgttttagttttttattaaagggttattttttttgtgaattttgatttttaagggaaattaagaaaagtattaagtttaaagattttgaattgttttatagttaggttattgtttttttggtaatgtatattataatggtgtgttttttttttttttatttgaagttaagtgggtttagtgaagttttatttgtagggtagttggggatgtagggagtttttaagttttaggttggagttttgattttgtttgtttttaggaagatgataaggattatggtttttagtatggagtagtgtttttttgttttttatttttagtgtgatttggtagtaagatattatttttatttttattaggaggtgattttgatatttagagatatttgtggatttgatgatgtttggttattagtggataggtgtttttagtttttttgtaaatggttggtatatttatttgagagattaaatatttttttaaagtatattatataataagaataattttaatttgtaaaaaaaatgagtgatatagtagagttttttttttaggttttataatttattagtgttggtaatatgtgtaatggaatgtggtttataatagtaaggtaagtttttttgtaggattttaagttttttgagatgatagaagtgtgtttaaatttattgaggtattttttttataatgaggtagattatgtgtttaaaagagagattattgtgtttggaaaatttggaattggtataaatatgaagtgagtttttttttatggagaggtttgtttgtatggggtttggttttttggggttgtttttgttggggattgttttttgttgtttagtttggaatttatttttggttaatgttttttggtatttttttttggtgatgtttaggttgtttatgtaggttgtgtggtgtttgttgtggtgtagttgtatgatttgtgtgttgatgtgaggttttagggtgttgtagttgtagggtaggttggggaggttgtgtttttgtttggagtttagatattttaaaattggagttagttgtttgttggtgttgaagatgagaaagtatagtttggttagttagtgttgtgggattgtttatgtaggttgggttgttgaggaatggtagtgtgtggtgttttttgagtttttgtgttttttttttgtggatttttgttttagttgttgtgttgggtatttttgggagaattgtttgtaggtgttttggttttgttaggtttggtgtggttattgttgttattgttgtggaggttttgtttgttgtgagtttttttgtttttggggttgtgattgggttttttttttttttatttgtatattgtttggtttaatatgttgttagtgttggtgttattgttgatgttgttgatttgttgaagttgttgttgaagttattatagttatgagtgttgtttttgtgttgtttgtgggttttaagaaagtgtggggagtagggttgtgattttagttgtgttgtaagggtattgttgttttgttttttttttttgtgggttttgttttgtgtttgttgtgtttaattttgggggtgttttgtgtgtttgttttgtttgtttgtgtttgttgtatattttgtgtttagggtatgggagaaaggaggttgtaggttagttttggttttggtaattttgttgtttgtttgttgtatttgagtggtgtgtggttgaagggaggtggtttttgtttttgtggagttggtatggtttgaaggttttgtttttggttttgtttttgagggtgttggtggggatttggttgtattaggtggttgtggtgtttgtttttgagttttggttgtgttgttggggggttgtggggtttagaggttttattgtaaaaagatatttatatttttttagggtttttgtggttgtttttagggaagatggggtttagttgttggttagtgttgtttagttggtttatgagttgagggtagagttagtgtttttttaatttgtatttagtatttttgtgttgtatttttgttttgtaagtaagttgattttgggatttattttaggataggaggtatatagattttgtttttattggttgtttaagaatagtttttggatatttatgatgtgtttgagattgtaggtaggatttgtatatatttatttttatttttatttttagggttggtattattgattttagtaatagtgaaattttttgaggttaagtagttttttttgggtatagttaattgagttaggattagtttttattttttttattattaagttttggtagttatgttttgtgtgtttatagtaattttgtgaattaattgtttaggataatataaaaggataatagaggatttttttttgtgttgttttgtagtttagtaagttgttaagtattaagtgtttttttaatagttaaataataattttgaatggtgtgaattttttatgtgtagaggttaggaaatttatattgttattggtgggagttgtttttttattgaaaagaatatgatggaaggtagtaggtgttgaattgtttttgttgttttttgtaatttttgtatagttttttgaaggatgattaggtttttggtaagtggaatgggaaaatagttaggtgaagaggaattatttgaatttggttttataataggaagggttgggtttgtttatagatgttagaagaatgtaattagggttatgtgttggggtgaaaaaggaaatttaggttgggattaggttatagatatttttatttttttaatttattatttatttatttttgagatatagttttgttttgttgtttaggttggagtattgtgttgtgatgttggtttattggaatttttgttttttgggtttaagtgatttttttgttttagttttttgagtagttggaattataggtgtgtatttttatgttttattattttttttttttttgtatttttggtagagatggggttttattatgttggttaggatggttttgaatgtttgattttaagtgatttgtttgttttggttttttaaagtgttgggattataggtaggagttatggtgtttggtttatagatatttttaaaatgtagataagagtaggggtttgatgtgattgttaattggaagttgagaaatatttttgttgaggtgagatatattgaaagtggttttttaggtaaggtggtttggtattgatttggggggatgaagggagtgtaggttagttaggaagttggtatatttgttttagtaggaggtattgtaggttatttttagggtattagttatgagaattggaagaaaagggtattttgaaggatgaatttataggatttagagatagattagttattgtaatggaaagatttgatttagtgataatgaaatatttttattgggaggttgagtttaggttatttatttgtattttttgtttgtatagagagtgatattttgagagtttaaagtgatttttaggatatgttttttagaataagtattaaatgttgggggttggtaggattgatagtagtagttaggtagaagaatttttaatattatatttgttattagttatattattataaaatattattatgattgtgagtatatttaaggttgtgggatatgggaggtaaagaaaagtttattttgtttattatatttagtgaataggttttgttttttttttttttttgttgtttaggttggagtgtagtggtgtgattatggttgattgtagtgatttgttgggtttatgttatttttttattttagttttttaagaagttggaattataggtgtatattattatgtttggttaattttttttattttttgtagaaatagagtttttttatgttgtttaggttggttttaaattttttggtttaagtgatttttttattttagttttttaaagttttgggatttatataggtttgagttattatatttggttgttttttttttaggtggttattgtagagggtattgaatggttttagaagttagattatagttgattgatttgtgttttaagttattttagttagtttaggatgttttttgtaatattaggatattatgaatatggattttttatagataaattttttaa

SEQ ID NO: 939 - DNA, 2001 bp, Artificial Sequence
  chemically treated genomic DNA (Homo sapiens)
ggttggattagtggaggttttaagaagagttagagtgttttgtatttttgatatgtgttataagtggtttaggagtggagggaggagtgttgtggtatgggttgggttggttgggttgggtaaagaaggttgagatgtgtttttggaagatttgttttttggttttggtgttatttgttttttattttttttttttttttaattagagtaatgatgtttaaatttgtatttatgtgtgtaggtaattgggtgggtggatgtgtggttattaaatttatagtattgttattaattttgggagggtatggttgggattaggaggagggggagtgtttatatttggggaggtaggtgtggaggtggttggtttggggattttgagtgtgtaggatttggggttggggttggggttggtaagttgggtgttgtgagtgtgttggagtgttggtttggagtttggtagggggtgtttgtattggttgggtagtttggggtggtggtgatggttggtggtggtggtggggtgtgtgttaggaggttatttttttgttgtgtttttggtggagttgggtttgtttgtttttggttgttgttgttattgttgtgtaagttggatagttgtgagggttggaggggaaattaggttattggtttgtagatgtggtgtggagtaggtgttttgggtttggagtaagatagtgtttgggaagtgggttggggtgggttgggtatgtgggggatttggagaggtggggattttggtgttttagttgtagtagttttttatgtttataaaagtggagagattggggaggtgtggtgtggttttggttgtggttgtttttttttgtttaaggagttgatattttgtaggatttgtgtgatgtttagttgttggtgttttttgggattttgttgttgggaggagggggtggaggagggtggagattgtggggtttggttaaggaaggtgtatatttttgggtgggtggttgtgatgtggtggggattaattttgtatgaataatgtgagtgtgtttggaaaagagattttttgttttgtgggtttggggtaagagtttgtaggttattttttttgggtaggggtgtttaatttaattggttttagggtattggtaatttggttagaggattgtgtggaggtagtggggtgagaggaggagggggtgatagttttaattgtttatagggtgggtgggatggtgatggagtgttgtaagaatttggaggggtgtgggtggttaagttgagtgtgtgtgggtgggtaggtgggtgagtgtgggtggtgggggtgttattagtttgattatttgtttttgtggggtttttgtgttttggatttgggaggaggtgtttttttgtgtttgggtattgtgtggtggtaggttgggagttatggagtggatagtggtggaatagggtggttgggttttgttttaattgtagtggttttgttttttaaattttaagtttagttgttgatatgttttttgtgaaatggagtttggtatttttagtgttgaatttagtggaagtttttatgatgaggaagttgtgtgatatgggggtttggaaaaggttggtaggttaggggggagggttaaagggattgtgggttttttatttttttttttttgtttgttttggaatttttgggtttggaaaggagaattattttggatgttggtgtgtgttgtggttggtgtttggtgattgggtttttttttgttttttgggggtttggtggggattttgttagttttttgggttgtgtttttttgttttgttttttttggtgtagtatttttttttgggtttttttgagttggttgtgatattaattgtgttaattgtgtgatttttatttttttggagaaggatttatttgggggaatttttatttttagtggattttgttttttttagtggtagttgttattttgggggaggattttttaatgattattgtgggattattat

SEQ ID NO: 940 - DNA, 2001 bp, Artificial Sequence
  chemically treated genomic DNA (Homo sapiens)
ataataattttataatggttattgggaaatttttttttaaagtgataattgttgttaagaagggtaaaatttattaagaatgaaaatttttttaaatgagtttttttttgagggggtggaggttatatagttggtataattggtattataattaatttgaggagatttagaggaagatgttgtgttaagagaagtaaagtgaaggagtgtgatttaggaggttagtgaaatttttgttaagtttttaggaggtggagagaagtttagttgttaggtattggttatggtgtatgttaatatttaggataatttttttttttaagtttgggagttttggggtaggtgaaaaaggggggatgggagatttatagtttttttaatttttttttttggtttgttaattttttttgaatttttatgttatataatttttttattatggaaatttttattgggtttggtgttgaggatgttaaattttattttataaggaatatgttaatagttgggtttggggtttgaggaatagagttgttgtgattggaatagagtttggttattttgttttattattgtttattttgtagtttttagtttgttgttgtgtggtgtttgaatatgagagggtatttttttttagatttggggtgtagaagttttgtggaggtaggtaattaggttgatgatatttttattatttatgtttatttgtttgtttgtttgtgtgtgtttggtttagttgtttgtatttttttgggtttttgtgatgttttgttattattttgtttattttgtggatagttggaattgttgtttttttttttttttattttgttgtttttgtgtggttttttagttaaattattagtgttttggagttggttgggttgagtgtttttgtttggggaaggtagtttgtgggtttttgttttgagtttgtggagtaggaggttttttttttaagtgtatttatattatttatgtaaagttaatttttgttgtgttatggttgtttgtttgaggatgtgtgttttttttggttaagttttgtagtttttatttttttttgttttttttttttggtggtggggttttggggagtgttggtgattgggtgttgtgtgagttttgtaaaatgttaattttttgggtgaagagaggtggttgtagttagggttgtgttgtatttttttggtttttttatttttataggtgtaggaagttattgtggttggggtattagagtttttgtttttttgggttttttgtgtgtttggtttgttttggtttgttttttgggtgttgttttattttgggtttggggtgtttgttttgtgttgtgtttgtgaattggtgatttggttttttttttagtttttatggttgtttgatttgtgtggtggtggtggtggtggttaagagtaggtaaatttggttttgttaggggtgtagtgaggaaatggttttttggtgtatattttgttgttgttgttagttattgttattgttttgggttgtttagttggtatagatgttttttgttaggttttgggttagtgttttgatgtgtttatagtgtttggtttgttgattttgattttgattttgagttttatgtatttgaggtttttgggttggttgtttttgtatttgtttttttaggtgtgggtgttttttttttttttaattttggttgtgtttttttagggttggtgatggtgttgtgggtttggtggttgtgtgtttatttatttgattgtttgtgtgtataggtgtgggtttgggtgttattattttagttggagaagaggaaagaatggggaatgagtgatattgggattggagggtgagttttttaggagtatgttttggttttttttgtttggtttgattggtttgatttgtgttgtagtgtttttttttttgtttttaaattatttgtggtgtgtgttgggaatatagggtgttttggttttttttggggtttttgttggtttgatt

SEQ ID NO: 941 - DNA, 1100 bp, Artificial Sequence
  chemically treated genomic DNA (Homo sapiens)
agattgtattttaataaataaataaataaataaataaataaaggttgagtatggtggtttatgtttgtaatttttgtattttggtaggttgaggtagatggaatatttgaggttaggagtttgatattagtttggttagtatagtgaaaatttgtttttattaaaaatataaaaattagggttaggtgtggtggtttatgtttgtaattttagtattttgggaggttgaggtgggtggattatgaggttaagagtttgagattaatttggttaatatggtgaaattttgttttttttaaaaatataaaaagtagttgggtgtggtggtgggtatttgtaattttagttgtttgggaggttggggtaggagatttgtttgaatttgggaggtggaggttgtagtgagttgagattgtattattgtattttattttgggtgatttggtaaggttttgttttaaaaaaaaaaaaaaaaaaagaaaaagaaaatattgggtgtggtggtagatgtttgtagttttagttatgtgggaagttgagttatgagaattgtttgaatttggatggtggagtttgtaatgaattgatattgtgtaattgtgttttggtttgggtgttaaagtgatatttggttttaaaaagaaaaaaaagaaaataggagaataatgaaattttatttatttattttatttattttttatttttttgagattgagttttgttttgttatttaggttggagtgttttggtgtaattttggtttattgtaatttttgttttttgggtttaagtgatttttttgttttagttttttgagtagttgggattataggtgtttgtaattatgtttggtttatttttgtatgtttagtagagatggggttttattatgttgtttgggttggttttgaatttttgagtttaagtgatttttttgttgttgttttttagtgtgttgggattataggtgtgagttattgtgtttggttaaaagttttaaattttagtaagttttaatttattaattttttttttgtatagattggttttttggtgttgtttaaaaattatttgtttggttttaggttttgaggattttt

SEQ ID NO: 942 - DNA, 1100 bp, Artificial Sequence
  chemically treated genomic DNA (Homo sapiens)
aaaaatttttaggatttagggttaggtaaatagtttttagatgatattaaaagattaatttatatagggaaaaagttgataaattggaatttattgaaatttaaaatttttggttgagtgtggtggtttatgtttgtaattttagtatgttggaaagtagtggtgggaggattatttgagtttaggaatttgagattagtttgggtaatatagtgaaattttgtttttattaaatatataaaaatgagttgggtgtggttgtaggtgtttgtagttttagttatttgggaggttgaggtaggagaattgtttgaatttgggaggtagaggttgtagtgagttgagattgtgttagggtattttagtttgggtgatagagtgagatttggttttaaaaaaataaaaaataaataaaataaataagtaaaattttattatttttttgtttttttttttttttttttgagattgagtattgttttggtgtttaggttggagtgtagttgtatgatgttggtttattgtaaattttgttatttgggtttaagtgatttttgtgatttagttttttgtgtagttgggattataggtgtttgttattatgtttggtattttttttttttttttttttttttttttttgagatggagttttgttaggttgtttagggtggagtgtagtggtgtgattttggtttattgtaatttttgttttttgggtttaagtgaattttttgttttagttttttgagtagttgggattataggtgtttattattatatttggttattttttgtatttttaggagagatggggttttattatgttggttaggttggttttaaatttttgattttgtgatttgtttgttttagttttttaaagtgttgagattataggtatgagttattgtgtttggttttaatttttgtatttttagtagagatgggtttttattatgttggttaggttggtattgaatttttgattttaagtgttttatttgttttggtttattaaagtgtagggattataggtatgagttattgtgtttggtttttatttatttatttgtttatttatttattgagatgtagttt

SEQ ID NO: 943 - DNA, 2250 bp, Artificial Sequence
  chemically treated genomic DNA (Homo sapiens)
ttagggtgtttatatagaaggtgtttagaaaaatattttgaattggtttagtttggtaagaatatgggttttggtagtaggaagtttaaatatttgttttattttttattattagtaatgtgattttggataatttatatagttttgttgagatttgttttatttgtaaaatattttttggagttgttgtgaggataaaatgataatatatataaagagttaggttttttttagaagaatgtttttgggtagtatgtatatttttatttttttttttagagagtgggggtaataggatatttttttttttaggggtattttttttttttagggatttatttaagttaggttttttttttagtgaaatgtgtattttgagggtttttaggatgaagtagtttattggaaggtattagtttttttttttatttttttagagttggatagtgtattaggggttggtattggttttttagttaggagatattttgggtggggttttgtttgttggaagtatgtagagtgtggggaggagggttttttttgtttgtgtttgtgttaatagtatttgtgttgttgtgttgggttttggtggttggagttatatatgatgttatagataatgatataagttggtgttttattttgatatagtgtttgagttgtataatgttatatttgggtgttaaatatttggttttgtgtgatttggttttatgttttttgttgttgttttttgtgtttttgggggaggtggtttggtttggttgggtagggggttggtgggtgagttttgtgggtgggttggtgagtgggtgatgttatgggtagtggtgggtgggttatttggaggtgaggtgttgttaggtgagtttagtgagagtttagttgtattgtattaggtaaatgaggtttggtttgggtgggggtgtgtgttaaggggaggatattgggattattttttttttttttgttttattattttttttattatggttttgtttggttagggattgattaaattttgggggagtttgggagttggaattggtataagggaggatgtttgttttttttttgtttttgtttttttgtagtttttttttttttttgtatttggtgtttttttgtattttgtgtattttttatttggagtttttttttttttttgtttttttttttttttttttttttttaggttgtttttatttgtttgtttatatgttgttttttttttttggttttttgtgttttttttgttgtagttggatgtgttgggaatgggttaagttaggggtggtgtttggatggggtggggtggtggaaagggggtggtgtttggaggggagggggtgtgtagagttggggtgggggggttgtggtgtgtattattagagattgagtgagttgttagttgtttttggtttggtgggggtggaattgtgtgggatttttatttttatttggaatttttgttatggagaatttttggagaagttttggatttttggttgggaggaggaagtgtttgttgatttttagttttgtgttgattttgtttttggtttgtggatttggggagttgttgtattttgttttggatgttatgagattttagatgggagtttttttgaggtgaagttgttgagtttttgggttttgttaggtttttttgggagagttgatggatttttttttttagtatatataatttttttgttttttattgggattggtggagtggttggtggatttagatgtggggattttagggtagggggtgttttttgtttgggttattagttggggtgaggggatgtttttttttttttagttgttttgtttggatggtgttgttggttgagtgatgggggtggtgtgtaggattttttagtttggattttttgtttttgaggggaaagatgtatgagagtgtagaagtggggggttttatttttaatttttttttagtggtggatttttataattagaattgggtttgtttgtttttagagaaggggttttttgttttgggtttgtattttattttgttttggattttgttttggaatggtttaaattattgtatgtattggttttttagtttgttgttgtagggggtgggagtgggtggtagggtttttattattatttgggggtgagagttttggggtgtagtggaggttttgtttttattttttatttaatttgtgttgtttttgttggataattgaatttttttggttgtat

SEQ ID NO: 944 - DNA, 2250 bp, Artificial Sequence
  chemically treated genomic DNA (Homo sapiens)
gtgtggttgggagggtttaattgtttagtaagggtaatatgggttaagtgaaaggtagagataggatttttattatattttgggatttttatttttgagtagtagtggaagttttattgtttatttttattttttataatagtagattgagaggttggtatgtatagtggtttgagttattttaaagtggagtttggagtggggtggagtatggatttggggtggggagttttttttttgggagtaaataggtttggttttggttataaaaatttattattaggaagggattaggggtgggattttttatttttatatttttgtatatttttttttttgaaggtaagaggtttgagttgggaagttttgtgtgttgtttttgttatttagttggtggtgttatttgagtagagtagttgggggagaggagatgtttttttgttttgattggtgatttgggtagggggtgttttttgttttgaagtttttgtgtttaagtttgttggttgttttgttagttttggtgaaaagtagggaagttgtgtgtgttgggagggggggtttgttggtttttttagggaagtttggtggggtttgggaatttagtggttttattttgaggggatttttgtttagagttttgtggtgtttgaggtagagtatagtggttttttaagtttgtaggttgggggtgggattagtgtggggttgggggttaatgagtattttttttttttagttggggatttggggtttttttagggattttttgtggtgaggattttgggtgggggtggggattttgtgtggttttgtttttgttaggttaggggtagttggtgatttgtttggtttttggtggtatgtgttatggtttttttattttagttttgtgtgtttttttttttttgggtattattttttttttattgttttgttttgtttaggtattgtttttggtttaatttatttttggtgtgtttggttgtagtgggagaaatgtagggaattgagagggagaggtggtatgtggataggtaagtgggggtagtttgggaagggggaggagaggagagaagtaggaagggggaaaggttttagatgaggagtatatagagtatagagggatgttgagtatagggagaggagggggttgtgaggggataaggatggaagaggggtgggtgtttttttttgtattagttttggtttttaggtttttttaaggtttggttagtttttggttgagtgaagttgtggtggaggaggtggtggggtggggaagaggggggtggttttggtgttttttttttaatatatatttttatttaggttgggttttatttgtttaatgtaatgtggttgaatttttgttgaatttgtttggtggtgttttatttttgagtgatttatttattgttgtttgtgatattatttgtttgttagtttgtttgtggggtttgtttgttagttttttgtttggttgaattgggttattttttttggagatgtggagagtggtggtaggaggtgtagggttgggttgtgtggggttaagtgtttggtatttgggtgtgatattgtgtagtttggatgttgtgttggaatgagatattggtttgtgttattgtttgtgatattatgtgtgattttggttgttggaatttgatgtggtagtgtgggtgttgttggtataaatataggtagagggggtttttttttttatgttttgtgtgtttttggtgagtaaagttttgtttaaggtgttttttagttggggaattagtattggtttttggtgtattgtttagttttggagagataaaaggaagagttggtgttttttagtggattattttattttagaagtttttgggatgtatgttttattggaagaaaggtttagtttgggtaggtttttagaaagaggggatatttttggaggagggggtattttattatttttattttttaaaaggaaggatggaaatgtatatgttatttaaggatatttttttagaagaagtttggttttttatatatgttgttattttatttttatagtaattttaagagatgttttataaataaaataggttttagtaaggttatgtgggttgtttaagattatattattaataataaagagtagagtaggtatttgaattttttgttgttaaagtttatgtttttattaagttaggttaatttaaggtatttttttgagtattttttatgtggatattttgg

SEQ ID NO: 945 - DNA, 2001 bp, Artificial Sequence
  chemically treated genomic DNA (Homo sapiens)
aggtagataagggttgaagtgaggtagttatttgggaatttattgtagaaggaggtagtagaagagatggagtagagtaaatgagatttgggaaatatttaggaggaagaattaattaagatttgaggattaggtgttgtgaggtgagggagaaggtaatgttaattatgaattttaggtatttgttatgtgttatttttagaaaaagagtaggtttgaggagaaagatgtttggttttgaatatagtttgtagagtttattgtatatataagtggagaggtaagtgggagttgtaggtgtgaagtttagaggagaggtgtggatgggataagtatttaagatttttttatttagaaggaaattgaagttgtgggtgaggttattatagtatagtgtttaggagaagtttaggtaaagaagttgatgaatgtttggattttgataattttaatatataatggtttgatagtggaggtggaggtaatgtagaaagaatgttagaggtaggaaaaagtaagaaggatgtgttattattatgattaaggaagaaatgtgttttaagaataaaggtgttaattttgttttatgtttttgagttgttaagtaaagtgagaaaaatagaaaagtgttttttgggtttagtaatatggaggttagttgttaaagggagtttttagaatgatgatgttgttaaatttgttttttgtttggatttttggtgatgaaattattatagagatttttaagtttgggtttttgtaaatatagtatgtttttttgattgttttttaagatatgtaaatagaatgttagtttttagtgtggtaatatgggattgggttgtagtttatttagttggtggtttttgttggaagttggtggaaatattttagtgtgtgggtggagtagtggtttgtagagggaggtggtggtgtttatggaatagttgtgtttaattggttgagtgtggagttgtttggtgattggtgggggtggaagggggttgggtgttagtgttgtttttttttttgttgggtagttttgtttttttgtgtagagtttgtggaggggtttggttgtattggggggattgtgtttggtagattttagattgagtagaggtgatttagtgtgtttgggagaggttgtattgttgtgtttttgtttagtttttttggattttgtgtgtagagtgagtggttgtgaggttttgggtgttgggggtgggatgtgtagggatagagtttttgggttgtgtagttggatgttgggtgaggatgggttgtttgtgttgatttgtgaatagtgattttagaggaagaatgtgttttgagtattttaagtgtgagtagtgttatttgtttttggagatggtattgtttagtatgattgtttttgttagttgtgttttggtagtgaagaggatttgtgaaatataatttttttttagaaggtattgtatttttttatttattgttatttttttttgtttttatttttttttattagttatgtttttttttttttgtagaaagttttatttgttgtatgttatttttgagagttgtttaggttaatgtttgtattttgtgtatataattttgatagttttggtatttaatgtgttgtgtgtagttgtttttttggttgaatttttaggtttttgttggggtataaggtggtaggttagtaaatgtttatggaattagatgaatgagtatatgattttggaattttaattatgtttttatgtttaaagatggaagggtttaatgtttttttagagtttaaaagtgatgtttagtttttgtagattttttattttaaaataatatagttttaaaaaaatttttggttggtattgaagagttttgtggtaggtatgtagaggtgtggttgattgtgttttgaatgttgtttgtatagataaggagttatttttatagaatagaaataggatttgagtttttagtatagtttattgtgtaattattgtttaa

SEQ ID NO: 946 - DNA, 2001 bp, Artificial Sequence
  chemically treated genomic DNA (Homo sapiens)
ttaagtaatggttgtataatggattgtgttggaggtttaagttttgtttttgttttatgaaaataattttttatttatataaataatatttaaagtataattaattatatttttgtatatttattatagaattttttagtattggttagaaatttttttaagattatattattttggggtggggggtttgtaaaaattaaatattatttttaaattttaggaagatattaagtttttttatttttgaatatagaaatataattaagattttgaagttatgtatttatttatttgattttatgaatatttattgatttgttattttgtgttttaataagggtttggggatttaattaaaggagtagttatgtatagtatgttaggtgttaagattgttgaggttatatatatagagtgtgaatgttaatttagatagtttttgaggatggtatatagtaaatgaaattttttgtgaaaagaagaaaatgtgattgatggaaaggggtggaaatgggagaaagtgatggtaaatgggaaggtgtagtgttttttagaggaaaattatattttataagttttttttattgttagagtatgattggtaaggataattgtgttgagtagtgttatttttgagaataggtggtattgtttgtatttggaatatttaggatgtgttttttttttgggattattatttgtgggttagtatagatggtttgtttttgtttggtgtttaattgtatggtttgaggattttgtttttgtgtgttttatttttggtatttggaattttatggttatttattttgtgtgtaggatttggaagggttaggtgggggtgtggtggtgtagttttttttgagtgtgttgggttgtttttgtttggtttggggtttgttaggtgtgatttttttggtgtagttgagtttttttgtagattttgtgtaggaaagtgaaattatttggtaggagaaaaggtagtgttggtgtttggtttttttttgtttttattaattattgggtggttttgtgtttagttaattagatgtggttgttttgtgggtgttattgtttttttttgtgggttgttgttttgtttatgtgttggggtatttttgttggtttttggtgggggttgttggttgggtgagttgtagtttagttttgtgttgttatgttgggaattggtgttttgtttatatattttagagaatgattagaaggatgtgttgtgtttgtagaagtttaaatttggaggtttttgtagtagttttattgttgagaatttaggtagaggatagatttggtgatgttgttattttagaagttttttttagtaattgatttttgtgttgttaaatttagggaatgtttttttgttttttttattttatttgatagtttggaagtatggggtagagttgatgtttttgtttttgaaatatgttttttttttggttatgatgataatatattttttttgtttttttttgtttttggtattttttttatattgtttttatttttattattaaattattatatgttaaggttgttagggtttagatatttgttagtttttttatttgggttttttttaaatgttgtgttgtgatgattttatttatagttttagtttttttttagatggaggagttttaaatgtttattttgtttatattttttttttgggttttatatttataatttttatttgtttttttatttgtatgtgtagtgagttttataaattatgtttagaattaaatatttttttttttaaatttgttttttttttagaaatggtatatgatagatatttaggatttatagttgatattgtttttttttttattttgtaatatttgatttttaaattttaattgatttttttttttaaatattttttaagttttatttattttgttttattttttttgttgtttttttttgtagtagatttttgaatggttgttttattttagtttttatttattt

SEQ ID NO: 947 - DNA, 2001 bp, Artificial Sequence
  chemically treated genomic DNA (Homo sapiens)
atatggaaggttgattttttaaaattagtgtaagaaaaatgataataagttatatttggagggattttggggattatttatttgttggatttaaagttgaggaagttgtgggtagtaaataaggttttatagttgttggtggtagagtagagattatagattaaattgtttgagtttaaatttaatgttttttttttttagattgttatttgtatatatatgtatatatgtatatttttttggaggtattgtatagtaagtatagaagtatgttattgagttttgtgtttttaaagtatttgattgtttttttgttgggggaaagggtaggtagaaaataagattttgtgtgttgttgttgtgttgttttttgtttttttgatttgtgtttgtagagaaagttttaagagttgttttaggtttttttttatgttttttttttttttgttgtagttgagtttttagagtgtgagtgtgtaggatgatatttggttggttgagagttgttggggaggtgttggtgggtgttgagagtgtattgattttgatgtggggtgtagtatggttgggaagtttttgggtttttggttaagtgtgttgggggatggtataggggggtgatgtgtatttattatttggtttgtgtttttttggtttttggtagtttagggtgggtttggttggggattttaatggttgggtgttggttttgggagaagggtatgtggagggtggagggttgtgttttggttttggtttggttttaatgttttttttttggtgtgtaggtttagaaatagggtggtttttttggttgttgttttggtggtttgggtttttatatatagttatatttattgttaattgggaggttggtggttggtagtgaatgggtgagtggtttttgtgggaggagtggggagggggtatggggtggagggaggagaggaggaaggggggtaggagaaaaaagtttttttaaaaaagtattggttgttttgaggaatgtggttgtttttttgggaaagtatatatttgggagaagtaggtggttttgtgtttgtatttttgtttttttgtttgattgtgtgtttgttttgttgtttttgttgtagttttagggttttttgttgttgttattatggatgttattaagaagaagatgtagatgttgaagtttgataaggagaatgttttggattgagttgagtaggtggaggttgataagaaggtggtggaagataggagtaagtaggtttgtgtttttttggttttgtgtttgtgtttagagtgttgggatttgagtttggtatttttggttggatttttattttgaggatttggggagttattattttatttttattattatttagggtggttagggtgtgtgtttggaaagaaggaagggaaatgtaagagttaggtttagtttaatttagtttggtttgaggatgtttattttttttttttggtttttatggtttgtgaaattaagttttagaggtgttttatttttaggattgggaattagtttgggggagggaggaggatatttggtttttggggatgtttgaaggaagggtgagggatggagaaagggggttgagtaatttaagtgttagaagtttgttgatttttgattggggagaaaggaattttaaatttggggaggagaagggagttttggagttgttatttaagaataaagatggggtggaatggaggttatagtttgaaagttaggttagtagtggtgtttttttgtgtttttaagtagtggatttgagtttgttgagattttggtaggagttttgttttagggtaggtgggtgtgtggggtgagttgtggagtggttttagtttgggtaaagaggaagttattttgggttttttgtattttaatttggtggtgttttgagtttgaggggttttagttaatttgatgtttgtgtgttgtgtgtgtttaatatttggtttgtgttggttgtttgtgtttgt

SEQ ID NO: 948 - DNA, 2001 bp, Artificial Sequence
  chemically treated genomic DNA (Homo sapiens)
gtgggtgtgggtggttggtatggattgggtgttagatatatataatatatgggtgttgggttggttggggttttttgggtttggggtgttgttgagttggagtgtaaaggatttgaggtaattttttttttatttgagttggaattgttttgtggtttattttgtatatttatttgttttgggatgagatttttgttgaggttttagtgggtttaagtttattatttggggatatagaagaatgttattgttggtttggtttttgggttgtagtttttattttgttttatttttgtttttaggtaataattttaggattttttttttttttttaagtttaaggtttttttttttttagttaaaagttaatgaatttttaatatttgagttatttgattttttttttttattttttgttttttttttaaatgtttttaggaattgggtgttttttttttttttttaaattgatttttagttttgagaataaagtgtttttaggatttgattttgtgggttatgggaattagagaagggaaataagtgtttttagattagattaagttagattaagtttggtttttgtgttttttttttttttttttagatgtgtgttttggttgttttgggtggtggtgggggtagggtggtggttttttgagtttttggggtggggatttagttgggggtgttaggtttgagttttggtgttttgggtgtgggtgtagggttggggaggtgtagatttgtttgtttttgttttttgttgtttttttgttggtttttgtttgtttagtttgatttaaggtgttttttttgttgagttttagtatttgtattttttttttgatggtgtttatggtggtggtggtgaggggttttggggttgtagtaggagtggtggggtgagtgtgtggttgggtggaggagtgggagtgtgagtgtggagttgtttgttttttttagatatgtatttttttaagggggtgattgtattttttaagatagttaatatttttttggaaaagttttttttttttgtttttttttttttttttttttttttgttttgtgttttttttttgttttttttgtgggggttgtttgtttatttgttgttggttgttggttttttagttgatggtggatatgattatatatggggatttgagttgttgaggtggtggttggagaggttgttttgtttttaaatttgtgtgttagggagagggtgttggggttgagttggggttgaggtgtaattttttgttttttgtgtgttttttttttagggttggtatttagttattagggtttttaattgagtttgttttgagttgttggaggttgggagagtgtggattaggtggtggatgtgtgttgtttttttgtgttgttttttggtgtgtttagttaaaggtttgggggttttttagttgtgttgtattttgtgttagggttagtgtgtttttggtatttgttagtgtttttttggtagtttttagttagttaggtgttattttgtgtgtttatgttttggaaatttaattgtagtagagaaagggagaatgtgggagaaagtttggggtggtttttgagattttttttgtgggtgtgggttagagaggtagggggtggtatagtgatagtatatggagttttgttttttgtttgtttttttttttagtggagggatagttaaatattttagggatataggatttagtggtgtatttttgtgtttgttgtgtagtgtttttaaaaaggtgtgtatgtgtgtgtgtgtgtgtgggtggtagtttaaggggaaagaatattgagtttagatttaggtaatttggtttgtggtttttattttgttattagtaattgtgagattttgtttgttgtttgtggtttttttaattttaaatttagtgggtagataatttttgaggtttttttagatataatttgttattattttttttgtattgattttagggagttggttttttatgt

SEQ ID NO: 949 - DNA, 2002 bp, Artificial Sequence
  chemically treated genomic DNA (Homo sapiens)
tttttattttgaaaggagttatttttttgtagttttttagttgtgaaaagaggaggaagttggttgggttgggggttgtggggggtattttttgtagatggtgggatttttttgttggttatggtaaaaatgaggtttgttttttttattgtttttaattttagtttttggtatattgttgaaagtaattgaataaaattggaaatttgagaaggtgtttgtttggattggtgagattttgaggggagaaagaagtggggattttgttggtattagtggtgttttttttttggttattgttaatttttattttagagggtattgttttgttatttagtttaggtttttttgtgagagttttgtgggtttgtgtagtttttgtgatttgaatagatttttagtttttggaggaatgtttgtttttttaataataaaaaattaaagaagtgtttataaatgttaagtttttttgtattatgtggagtatagaggataatgattatagttatttttgaattttgtttatggtatagtgttggagttggggtttggggtgttgttttttggggggttttgatttttagttgtttttgttttatttgggttgttaaggggttgggggaggtggtgtttggggtaattgggggagatttagggtgttgggggtatttggggaatttatgggggtttaaaggaattaggagattgggattttgaaggggatttggggggtttggggtttttgggggtggttgggggtttgtggatttgggaagttttgaggatttagaggttgggtgtgttttgtttgtggtgttgttttttttgtaatttttttagtttttgagggaagaggtggggtgtggggtgtggttaaaaggtgttatggtgggagataggtgttgtggttttgtagtgtttgtgtgtttttttttttgatttggagttttttggtggtgtttggtttaggatttgtttaggagtgtaggagttttagtgtagagattttaatgttgagatttttgttttggttttgttgtgtttttttttgatgtaggtgagtttgttggttttggattgtttggttaggaatttggtggtggggagggattgtgagatttagagtggttgtttggttgtgtgggttttggggaattggggggttggattaatatatgtttttgggttggggggtgggggttgttttttggagtgggtgtttttgtggttgagttttggagttggaatggggtggttggggaagtggatgtgatggtattgtttggggtgtgagtggggttgggtgtgtgtgggaggggaaaaaggtgtgggtgagttgttagtgtgaggtttgtggtgttgttgatgtttttttggggtattttagtgtagttgtttggttatttgatttattgttattaaatgttttaaatttattgaaagtttagttttgaagtaaagttttgttttgttggtgaagtaggaagtttttgttgtaggaattgatttttattttttggagtggtttttgtagaaaaatttttgggtagagatttgggtggagtttgtttagaattaatgtggagttagttgattttggtttattttggggttaagattttagtggttttttttttttttaaatattttatgagggtttgtttttgggttgtgttttttgtttagaaggaaaatttttaggatttttgtttgtgaagaggtggtgtgtggttgagatttgtgtttttaggatggttttattagtgttttgattttgttttattggaggaggaaggtagtttgaatagtgtttatttaattaatagttgttgagagttgggttttgtggttatgtatttgggattgttttgagaagtgtggtatggttgtgtttttatgtgattttagagttttttttgaaattgttgtgtatagttggttataattttagatattggtgagaagggtggaggaattttttggggatagttaggtaaggttg

SEQ ID NO: 950 - DNA, 2002 bp, Artificial Sequence
  chemically treated genomic DNA (Homo sapiens)
tgattttgtttggttgtttttagagggtttttttattttttttattagtgtttgaaattgtgattgattgtgtatagtagttttgaaagggattttaaggttatatggggatatggttgtattatgttttttaaggtagttttaggtgtatggttatggaatttagtttttagtagttgttagttaggtgagtgttgtttgggttgttttttttttttagtggggtaggattgaggtattgatggaattgttttgaggatgtgggttttagttgtatattatttttttgtgaataagggttttaaaaattttttttttaggtggggagtatagtttggaaatagatttttgtgaagtgtttaggaaaaagggaagttattgaaattttggttttggggtaggttgggattggttggttttgtgttagttttaggtaaattttgtttaaatttttgtttggggatttttttgtagaagttgttttaagaggtaaaggttagtttttgtagtgaaggttttttgttttattggtgaaatggagttttgttttgaagttaagtttttggtgaatttaaaatgtttggtggtagtgggttaagtagttaggtggttgtgttagagtattttgaagggatattggtgatattataaattttgtgttggtggtttgtttgtgtttttttttttttttgtgtgtgtttggttttatttgtattttgggtggtgttattgtgtttatttttttggttgttttattttagttttggagtttggttgtagaaatgtttgttttagaaggtggtttttgttttttggtttaaggatgtgtgttggtttagttttttggttttttgagatttatgtggttgggtaattgttttgggttttgtggtttttttttgttgttaggtttttggttgggtagtttggggttggtgggtttatttgtgttgggaggaagtgtggtggggttggggtgggggttttggtgttggggtttttgtgttggggtttttgtgtttttaggtgggttttgggttgggtgttgttgaggggttttgagttggggagaggagtgtgtgggtgttgtggggttgtaatatttgttttttgttgtggtgttttttaattgtattttatattttgtttttttttttggagattgggaaagttatggagggggtggtgttgtgggtggagtgtgtttggtttttgggtttttagagttttttgggtttgtgaatttttgattgtttttgaaagttttgaattttttaagttttttttgaggttttgattttttagtttttttgagtttttatgagttttttaagtgtttttagtgttttgagttttttttggttattttgagtgttgttttttttagttttttggtggtttgggtgaagtgggggtggttgagagttgggattttttaggaagtggtgttttagattttggttttggtgttgtgttgtgggtggggtttagggatggttgtggttgttgttttttgtattttgtatagtgtgagaggatttggtatttatgagtgtttttttaattttttattgttagagaaataggtatttttttaaggattgaagatttgtttgagttgtggaggttgtgtgggtttgtgaggtttttgtagggggatttaggttgggtggtggggtagtgttttttggaatgggggttaatggtggttgaggagggggtgttgttggtgttggtgaagtttttgtttttttttttttttaaaattttattaatttgaatgaatgtttttttgaatttttgattttatttaattatttttaataatgtgttaaggattaaggttgggggtggtgggagagataagttttgtttttgttatggttggtaggggggttttgttatttgtggagggtgttttttgtggtttttggtttagttaatttttttttttttttgtaattggggaattgtaaggaggtgattttttttggggtgagga

SEQ ID NO: 951 - DNA, 2001 bp, Artificial Sequence
  chemically treated genomic DNA (Homo sapiens)
gaatttggtttttgttttttttatttttgttattaggtgtttgttgtggagttgtggtttatttgggagatgagtggggttgatatgtgtgtatatattattgttatttagttgttgtttggttttgtttggagtagtggattttatttgtttatttgttattgagttattttttagtatgttttagtaggatgttgatatttttaattttggtttttgtttttttattttttttggtttgtttggtttttaagtttgtttttagttagtttttatttagtttttgtagtagtttttattttttatttggttttttggagttttttgttggagtgttgattagtggatatttttgtttggttgtggtggtttgattgtttttttgttttttttgtgtgattttggggtaggttttggtgtagagtgttgttaaggatgttgagtgggaggtgggattgtttagatattttttagtgaagtgtatgtgtgtttgtaaattattgttggttgttgggagattgtgaggattggtttaggttgtggtggagttgagggtgagggagaggttgtgtgagtgagtagagtttagagttgtgtgtttttagaattgtgtgtttgttttgtgtatttttgtgtgttatgtttagttgttttgtgtgttttgttatgggtttgttgggtttttgtgttttttagtttttggagtttattttgattggggttataatatttattgagatttttttttttgttttgtatttttgttattggtattggatttgtagaagtgtgtgtgggattagaggattgttttttttataataattggtttttgtattttagtagttgttggaagttttagtttttttattgttaagtttatttttgggagatagaagatgtgtgattttttttttgttgtttttggggtttttttgtagttttggttaggtggatttatttttaggatttaaagttgtttaaggagtttttgttttgttagaggagggtggagagggtggtgggaggtgtgtgtttgagtgggttttattgttttgttttatattatttggtgtatattttttttggtattttgggttgttagttttgttgggtattgggttttagatattgtgtggtttttttggagtagtaagttaaagaaagtttttagtgttggtgaggaaggaggtggtggggaaagatgtgtggtgttggttggtagatgttgtttttgttgttggggttagtgttggtgattttgaataaggtggtattgtaggtgtgtttggtgtagtgtttttgtttgggtagtatagtggattgttatgggttggtgttgtgtagtgtgtttaggaatattttttgtaatattgagagattgtgagtatgtgttttttgtttttttttttttttatttgggttgtgtatttttgtttttattggaggaatttgttagtttagggttttgtgtttggggtagtttttgttagtttttttttatgtatattttggggttgagttttttgggagggtattggttagggaagggtttttgtttaaggaggggtgggtttgttggtagttgtgttagtttttttttttttgtttttgttttgttatttgtagttttttgttggttagttttttggggttggggagtgggtagataggggataagtattggaggatgtttggggtaagtgagatgttattttgttttttagagtttataaatggagttattttgtgattgttagtatttaggttggttttagagtttagtttttgtttttgttgtaggttggtgtggaggggatagtagggagatttaaaagagagaaatttgttttttttgattttttgttatttttttgggggtgaaggttaggaagaaggggttatggagtgtttgggggtgttttttataggttgtggggagaagggtgttttaggatggtgatattttgtatagtagttttgtgtagttttttgtttttt

SEQ ID NO: 952 - DNA, 2001 bp, Artificial Sequence
  chemically treated genomic DNA (Homo sapiens)
ggggggtggggggttgtgtgaggttattatgtgaggtgttgttgttttggggtatttttttttttgtgatttgtgagaagtatttttaggtattttatgattttttttttttaatttttgtttttaggagggtgataaaaaattggggaaggtaagttttttttttttgagtttttttgttattttttttgtgttagtttgtgataagagtgaggattgggttttgaaattgatttggatgttggtaattgtaaggtgattttgtttatggattttggagaataaagtggtgttttatttgttttgggtattttttagtatttgttttttatttatttgttttttagttttagagaattagttagtaaggagttgtgagtggtgggatgagagtaggggagggagaattagtgtagttgttagtggatttgtttttttttggatagaggtttttttttggttagtgtttttttggagagtttaattttaggatgtgtatgggggagagttagtgagggttgttttaggtataggattttgagttgataggtttttttagtggaggtaggggtgtgtggtttggatggggagaggggaagatgaagagtgtatatttatagttttttggtgttgtgggggatatttttgggtatgttgtgtagtgttagtttgtgatagtttattgtgttgtttgagtaagagtattgtgttgggtatgtttgtggtgttattttgtttaggattgttagtattaattttagtgatagggatagtatttgttagttaatgttgtgtatttttttttgttgtttttttttttgttggtattgggggttttttttagtttgttgttttgagggaattgtgtagtgtttgaggtttagtgtttggtggggttagtaatttagagtgttagggaaaatgtgtattaaataatatggaataaggtagtagagtttatttaggtatatgttttttattgttttttttatttttttttggtagagtaggagttttttgggtaattttaggttttgaggatgaatttgtttggttagggttgtaaggagattttaagagtagtggagaggagattatgtgttttttgttttttaaggatgaatttggtggtaaaagagttggggtttttaatggttgttaagatgtaggggttggttgttgtggggagggtggttttttgattttatgtatgtttttgtaaatttgatgttagtggtgaaggtataagatagaagaggggattttaataggtattatggttttgattaaagtgggttttggaagttagaaggtgtggaagtttagtgggtttgtagtagagtgtgtggggtaattgggtatggtgtgtgggggtgtatggggtggatgtgtagttttgggggtgtatggttttggattttgtttatttatgtggttttttttttgtttttgattttgttgtagtttggattggtttttgtggttttttgatagttaatgatggtttataaatatatatgtattttgttgaaggatgtttgggtaattttgttttttgtttggtgtttttggtgatgttttgtattaggatttgttttgaggttatgtagaaaagataaaagggtagttgggttgttgtagttgggtagaaatatttattagttagtattttggtgaggaattttaagaggttaagtggaggatgagagttgttgtgaagattgagtggggattgattgggggtggatttaaaaattaggtagattggaaggagtggaaaggtaaaggttaaggttggaggtgttagtgttttgttggggtgtattggagaatggtttggtggtaggtgggtgggtgggatttattattttaggtagagttaggtggtagttgaatggtagtagtgtgtgtgtgtgtgttaattttgtttgttttttagataagttgtagttttgtggtagatatttgatggtaaaggtagaagaaataagagttgggttt

SEQ ID NO: 953 - DNA, 2001 bp, Artificial Sequence
  chemically treated genomic DNA (Homo sapiens)
ggaattttatttatgtttggtttttttatttattttgtttatagtgtgtgttttagtttagggtgtgtgtgtgtttggtgtttgattttgggttgtgtgtgtttatttggtgagatgttgagagtggggggagtgtttttgttggtgtatttgggtttaggttaggggattttttttttttatttttgtgtgggtgtgggggtgtgtttgggttagggtgtgtgtgtttttgtgtttgtgtgtgtgtgtgtgggttagggtggtgggattgtgtattagggtagggtgtttgtgtttgtgtttgggtttgtttggtttgtatgttggtgtgattttgatttggatttgtgtttttggatgttgagaggttagtgtggtgggggtgtttagttttttggaggagtattatgttttgatatttttgttttattgttttaaagttggtttggggttttgtagggagtggtttgtatggggagggtttgtgtgttgtgtttttgggaggggtaagagagtgggggtgtagggggtgggttaggtttttgggtgtggtgtgggtttgggggatttgtgtggttgatgttaggttattttttaaatagagttggtagtgtgttttgtttggtattttttgaagagttagattgtggttggtgttagtgttattgtttggtttatttgttagtttgtatagttgtgttgttgttgagtgttttgtgagtggtgttttgaggattaggaatggggttttgggtgttgggtgtgttttgaatttggtgtatgtaagagtttgggagtgtttgagttgtttggttgtttggagttttattgtttaggattgggagatgttggaaatgtaattgtttgttttttgaggagttgttgtttttgggattttttggtattgtgtgtattttggttagtagtttttggagaagatggtgtttttaatgtttgatttgtgtggttgtggtagtgttatgtgagttttttaggtgattgtagggttatagtagtttagttgttggtgtttttttggaaattatgatttttggtgtgggtttatggagttatggtttatagggttttgggttgtgtggggttattttagttgtggagggtgtgtaggttgttttttgtttttatgtttttgtttttttgtatttatttgtgttatagttttttgtgttgttgtgatgatttgggttggagttgtttttttggtgtgttttgttgtttttgtggttttagtgtgggtggttagaaatttttttagaagttttgtttttgtgatttttttgggttgatgtttagtgagtttagtgtttttagtgtgtttgttgttgttgtgtttgttttttgtttttttggttttaattattttggtttatttaagttgggtattaagtggttgttttaagtttttattgtgggtgtgaagaaggggggtatttgggttgtgttggagtttatttgagtatatttggatgtgtgggttttgggtatggaattttatttttttgataggaattatggttgtgggttggattggtataggtaaggattaggagttttgttttgtgtgttgggtttttgattgtttttattgggagagttatttgttttttgtgtttttttttttttttaatttaatttattgtatgggtttaggttgatatatagggttatggggggttatagtagaatttatttagaattttttagtgataatttagatgggtagtttttggaattgtaaagggtgtttttttgttattggagttgttggaaaaggattatttttagttaaatttaagtgttagttaaagggttaattttttttgtgattagtttttagggtgtttaaggaagggataggtgaggatttgtgttgtttgaatatggtattattttaattttttgtaggtttttgttggtatttagtttttgaaggattttgagaaagataaggtagtttagagattttttgtagtaaggttt

SEQ ID NO: 954 - DNA, 2001 bp, Artificial Sequence
  chemically treated genomic DNA (Homo sapiens)
gagttttgttgtaaggggtttttgaattgttttattttttttagggttttttaggggttgggtattagtaaagatttatagagggttaggatggtgttgtgtttaggtagtataggtttttgtttgttttttttttgggtattttaagggttggttatagagggagttagttttttagttggtatttaggtttgattggagataatttttttttaatgattttagtgatgagggaatgttttttgtagttttagaaattgtttgtttagattattattgggaagttttgggtaaattttgttatagttttttatggttttgtgtgttagtttgaatttatataatgagttgggttaaaagaaagagaaaatataagagatggatggtttttttaatggaagtgattagagatttggtgtatggagtggagtttttggtttttatttgtattaatttagtttgtggttgtagtttttgttaaagaagtggggttttgtgtttaaggtttgtatgtttgggtgtatttggataaattttagtatggtttgggtgttttttttttttatgtttataatgagggtttggggtaattgtttggtatttagtttgggtgagttggagtggttggaattggagaggtgaggggtgggtatggtggtggtgggtgtgttgggagtgttgggtttgttgggtgttggtttggagggattataggggtgggatttttggagaagtttttggttgtttgtgttggggttgtggaggtagtgaggtgtgttgaggaggtggttttgatttaggttgttgtagtagtataggaagttgtaatataggtaagtgtaggagagtgagagtgtgaaggtgaagagtagtttgtgtgttttttgtggttgaggtggttttgtgtggtttaggattttataggttatggttttatgggtttgtgttgggggttatggtttttgagggggtattggtggttgagttgttgtggttttgtggttgtttagagggtttgtgtggtgttgttatggttatgtgggttgggtgttgggggtgttgttttttttgggggttgttgattagggtgtgtatagtgttagggggttttgggggtagtggttttttggggaataggtggttgtatttttagtattttttggttttaggtgatggggttttgggtagttgggtggtttgggtgtttttaggtttttatgtgtgttgggtttggagtgtgtttagtgtttgaagttttatttttgatttttggagtgttgtttatgaaatgtttggtggtggtgtggttgtgtgggttggtgggtggattggatggtggtgttggtgttggttgtgatttggttttttgggaaatgttgagtggagtgtgttgttggttttatttaaggagtggtttgatgttagttgtgtgggttttttgagtttgtgttgtgtttagggatttggtttgttttttgtgtttttatttttttattttttttagaaatatagtatgtgggttttttttatgtaggttattttttatggagttttaggttagttttggggtggtgaaatgaaggtgttaaggtatagtatttttttgggaggttggatatttttattatgttggttttttgatatttagggatatgaatttaggttgagattgtgttgatatgtagattagatagatttagatgtagatgtaggtattttgttttgatgtgtggttttattattttgatttgtatatgtatgtataggtatagaagtatatgtgttttagtttggatatatttttatatttatgtgggggtggggaggagaagttttttaatttgggtttagatatattgataaggatattttttttgtttttgatattttgttaaatggatatatatagtttggaattggatattgagtgtatgtatgttttggattgggatatgtgttgtagatgggatgggtggaggagttgagtgtgagtgagatttt

SEQ ID NO: 955 - DNA, 5650 bp, Artificial Sequence
  chemically treated genomic DNA (Homo sapiens)
ttttggaagtatatttgtttttagtattttgtttttttattgggtgttttttgtagatggttaatgtagttattatatttggattttttttgattttatttttagaggattattttattttgaagtgttgaaggttttaggtattatttataatgataatttttaattttttagtttatttttagtttgtgtttttttttgatttaatttatttttaattatgtgttaggtttttatttttggatgttgaagagttatttttagttttatttagtttatttttattagaatatttatgagttgttgtttttgtagtttatttgtttgtttgtttgggaatagtaagttttttaagggtaggattattattgtgtttttagaggtgttgtattggaatattgtgggtatagggtagtgttggttattgtttttgggtattagggtagtaaataaatttagtagttgtgtttgtttgtttggagttggatttttttggtatagatttaaatgtagaagtataaggtttatgtttatgtatttgttagatatttaatgatttttaatgatagatatgtttttttaatattttttttagtttttttgattttttgagaatttttgaattatgtaggattttagttttagggtgtggttggatttgttgtgatgttagttgttggggtttttttttgaggtgttgttatgggatttgtggtgatttatgaggggtggttgggtggtggttattgggtgatggtgtagggttaagggttgggttttgggattgtggggagattgggggttttggagttttttagttttgtaggttattgttttgttgtttgatgttatttttgattggagttaagatggtggtggtgtggttgtgggtgttggggttggtgaaatagtggtggtggtggtggtttttggtgttttgaggtgttggtgtggtgggtgtgggtaaggagtggtgtgggtgggtggtttttgggtttgtgttgggatgttggtttttttttttgaggagtgtggtggtgatggtggtggtgatatgttggggatttggtgttgtagggatggttgggttggtggatgtgtttttttagaggttttgggtgtgttgggggttttgggatgaggtgtgggtttttgggttggtggttttgtgggtgggtggtggtgttgggtttttttttgttggttgtggggtttttgtggtgaagtttgggatttggtttgttgttgtgaagagttgtgtgttttgtgggggatgtgtgtgggttgtagagattggttgggtgtgggtggtggtggggttatttggggttttatgtggggttgggtgttgttttaattgttaagttgttgtgttttttttttttgtgtttttattgagtgtgttttgtatatttgtattttaaatttgttttgtgttttgtgtttttgtgttttttaaatagtttttgtgtggttttaatttggagattgttttttttaatgtttttatagatttatgggtgtatgtgtgtgtgtgtgtatgtgtgtgtgtgtgtgtgttatagatgtgtaattttgttattaattttgttaataaagttattaatgaattttttttgatggtggtaagtgagatatgaagtaaatttaataggttagtgttattttttaaatttttgtggtttttttgatttatgtgtgagttattgattttttgggtttgtagttttgtgttgggttgtgagttgtggtaaagattttatagttaattgggaagttttgatttttttaattatgtagttgaaattttttttaatagaaattttgtgttggttttttattttttttttagtgttgtattgagattttgggtgtatttgagatgtggaatgttttttgttgaattttagtaggtttttagatttttttaattagatattagaagaattatttttattttagaatttgattaaaatgtttaagtttttgtttattttaggtttattaaaagtgattgaaatttttaataataaatggaattttttaatgattttttttataatggtatatattttgttttggtttgattagttgtgtttaagtattagaaaaatgtaggttttttaaaaaaaaatatgataggaaatttatatatattaaggaggaggaattgagatatattgttatatgtttttttttagtagggttttgtgtttttgagatggtttaaattgttttattatttttgaggtttttggattaatatttattggttaaatttttatatgtagaattttagtttagttttgagatgatttttaaagattatttttattaaatttttttattttgagttatggaaataaattaaaatttatagtggaattaaaatttatttatattttttgtgattttagggttttttttatttaatatatttgttttggtttgattgaaataagttaatatattttaagtgtttagaaaagtgttagaatatgataatattgtttagtaaatgtttgtttttgttgattttgaaggtggtttttttaattgaaaggttggtatgtttaggtttgttttttttttattttgtggatagggtttgaaatagtatagtttaaatttgtaagaatgtattaattttgtaagtataaaatataataaaagatttttattgtagaaaattggaaagtagagaaaagtataaagaagaaatagaaattgggtataatttttttttttttagataattattgttaatgtttggtagatttttttgttttttttggtgtggatatgtgtatttttttttttattttatagtttatttatatatatatatatttatttatattttatataggattgataatatagtgtgtatattgtttgtaatttgttttgttttatgatatggtgagtatgtatttatgttattaattagttaatattatgtttaatggttatttaatatgtggatgggttgtaagttattaattaagtttatattgatttgtaaggttttttaagtttgagttttttttttattaagatttgtttgaaagtttttttaaaattgtgggttttaaagttttgtaattttttgagattatagtgaaaaatataaattttgttttttagtatttaaataagtattttttttgtgggtgtagttataagaagtaatatttaattttagtttttttttttttgtttttggttgtggttgtgtagttatgtatatatatttgtgtttatttttttgatgattattttatgttagatgtttatttatttatgagattgtttttttaagtagtttgtttttttttaagttttaaatttgatttataaattttttttaagttttgttaaattatagattttttaggatggaaagtattttaggttatttattatttttatgttttttgagtagttttttatgttatttttaatatttatgtagaaaaaaaattaaaatagtggatttttattagaaaattttataatggggagtggaagaggaggaggttgatggttgggggaaaattgttaaatttgtatgatgatgggtagttaagggagtttttagatgatgagggatattatttgattgtttttattatagataattgttgttttgtgtttagggttttatgttttgtgtgttgagtattagttatgttgttatttatggttataatatttggttagaggtttggggtggtggtttatttttttttttttgaagttataagtttttagttagagttataaaaattatttttatggagtgtttgaaagttgtggattttattattgaaaataatatttagtttttattaaagtagagttttttaatttttgtatttattgatatttgggtgagagaattttttgttgtggaggatgattttgtatattgtaggatgtttagtagtatttttgttttttattagggagatgttagtagtatttttttttagtgtgatagttagtaaaatttttagatatttttaaatagtatttgaattgttgtagtgaaggaaggtttatttaattgtatggttgaattattgaaatagattattgaatttttttaagaattgtaaggatagattagatggtttatattttgaagttaagaagtggattttaggtttgtttatgtttttttttatttttggttttgtgattttattgaatggttagttttagtatttttgttttggtattagttttgtggtatgaggtaaaataatgtgaggtattttggagattataaaggagtttttatgatgtggaattagtatttttagtatgtagattaaattatgaaatttgaataaatttgtatagagttgatgtgtggtaaataatttaagtatatagattattatgttgaatagtgtagaaataattgttttttagaaaagtaatttggtttagtaattttttgaagattgatggtagaggttatgttgtagtttttttgaaatttgtttttttgaaaataattaatttgaggttatgtatagaaatggtgagtttgttttgaggtaataaggtttatttttgaagtgtttatttaattttaatttaatatattataatttaaagatagtttattgatttttgtggaaaatatgtagtattaatgtagtttttttttagggggaaaagtataagttgttaaatttttatttgtaatttttttaagtgtagatagtattgattgaatttttattgtggtatatgtaatttttagttggaatgtattgataaataaaatgtgaaaagagatgtgtttttggagttatatttggtaggggtggttttttgaattatagaatatttgtataattttattggaatgaatgtatgtgttgtttaaatatttttttttaaagagaatgttttttattttttatttttatttttttgaggtatgaattagagttattgtatgtagtaaatttggtttatttggaatgaaatatgtttatagtattttttttagtattgtatagtatttatttttagagttttggtttatgttatgtttatattgtgtttttatttattagttttttggaatatgtaataaaggagattttattgaatatttattattttttagttattttggtgaaaagaatattttgtagtttttgtaataaattatattttgggttttgttttgaaagagttgaattattttttggtatagtttgtttgaaatatgtaaagttaagtgtaagtgttagtttgattatagggggtagtttgtttggaaattggtaaaatttatatattttatatgtgtttatatgtagttttattaagatttatgttaaattttggtgggataattttgtggtatttttatataatttaaattatgttatgtaagagttattaaatttttatatattttagtatgaattttgtatattgtttaagattttgttaagagaatgtaaattaaatataaattggagtattagtgtaaaagtgatattttaaatgttttttattttgtgaggtttattttttagggattttgttataattttgaaagatttagttttatagtatatttgaaagtaggagtttttagaagtatggtttttgggataaa

SEQ ID NO: 956 - DNA, 5650 bp, Artificial Sequence
  chemically treated genomic DNA (Homo sapiens)
tttattttaagagttatatttttgaaaatttttatttttagatgtattgtaaaattaagttttttagaattatagtaaagtttttaaaaaataagttttgtagagtgaggaatatttagaatgttatttttatattgatattttaatttatatttaatttatatttttttaataaggttttgggtaatgtataggatttatattgaagtatataagggtttagtgatttttatatggtataatttaaattatgtgaaagtgttatggaattattttattagagtttaatataggttttaatagaattatatataagtatatataaaatgtgtgggttttattaatttttagatagattgttttttataattaaattaatatttgtatttagttttatatattttagataagttgtgttaagaagtaatttagtttttttaaagtaaaatttagagtatgatttattgtaagagttataaaatattttttttattaaaatggttggaaaataataagtatttagtaaaattttttttattgtatgttttaaaggattaataaatgaaaatatagtataggtatgatatgaattaagattttaagaataaatattatatagtattaagaaaaatattgtaagtatattttattttaaatgagttagatttattatatataataattttaatttatgttttaggaaggtgggggtggggaatgaaaggtattttttttaagaaagaatatttaaatgatatatgtatttattttagtgaaattatatagatgttttgtaatttagaaaattatttttattaaatgtagttttaaaagtatatttttttttatgttttatttattaatatattttgattaaagattatgtatgttataataaaaatttaattaatattatttatatttagaaagattataaataaggatttggtaatttatatttttttttttagaggaaagttgtattaatgttgtatgttttttataaagattaatgaattatttttaaattataatgtattaagttaaagttaggtaagtattttaaaagtaagttttattgttttagggtaaatttattatttttgtgtataattttaaattggttgtttttaaaaaaataggttttggaaaaattatagtatagtttttattattaatttttaaggggttgttggattaagttgtttttttagaagatagttgtttttgtgttgtttagtataatggtttatatgtttaaattatttattatgtattaattttatgtaaatttatttaaattttataatttaatttgtatattaagaatgttgattttatgttatgaaaatttttttatgatttttaggatattttatattgttttattttatgttataaaattgatgttgaagtaaaagtgttgaaattgattatttaataaagttataaaattaaaggtggaaaggaatgtggatagatttgaagtttattttttggttttaaggtgtaaattatttagtttatttttatagtttttaaagagatttaataatttgttttaataatttaattatatagttagatgagtttttttttattgtagtggtttaagtgttatttggaaatgtttggagattttattggttgttatattggaaggaggtgttattggtatttttttgatagaggatagggatgttgttgaatattttatagtgtataggattgttttttataatagagaatttttttatttaaatgttagtaagtgtagaggttgagaaattttgttttaatggaagttaagtattgtttttagtaatggagtttatagtttttagatattttataaaggtggtttttatagttttaattagaaatttgtagttttaaaaagagagagatggattattattttaggtttttaattaaatgttgtaattataggtgatagtatagttggtgtttagtgtataaagtgtgaagttttagatatagggtggtagttatttgtggtaaggatagttaggtgatgttttttattatttggaaatttttttagttatttattgttatgtaagtttgatgatttttttttaattattaattttttttttttttattttttattatggagttttttagtagaagtttgttgttttggttttttttttgtatgagtattaaaaataatatgaaaagttatttagaagatatgaaaatagtaaataatttaaggtgttttttattttggaaagtttatgatttaataggatttaaaaagggtttgtaaattaggtttggaatttgaaaagaaataggttgtttaaagaaatagttttatgaataaataaatatttaatgtaaaataattattaaaagaataggtgtagatatatgtatataattgtatagttatagttaagaatggaagaaaggaagttgaaattgagtgttattttttatgattgtatttgtaagaaaaatgtttatttagatgttaaaaagtagaatttatattttttattgtaattttaaaagattatagaattttaaaatttatgattttaaaaaaatttttaaataaattttaatgaaaagaaaatttaggtttgagaaattttatagattaatatggatttgattgataatttatggtttatttatatattaaatagttattaaatataatattgattagttagtggtatggatatatgtttattgtattataaggtaagataggttgtaaataatatatatattatattattaattttgtataaaatgtaaataaatatatatatatgtgaatgaattgtaaaataaggaaagaaatatgtatatttatattaagagagataggaagatttgttaaatgttaataatggttatttgaagaggggaaggttatgtttaatttttgttttttttttgtgtttttttttattttttaattttttatagtgagaattttttgttatgttttgtatttataaaattaatatatttttatagatttaaattgtattgttttaggttttgtttataaaataaggaaaaaataaatttgaatatattaattttttaattaaagaaattatttttagaattaataaaagtaaatatttattgagtagtattattatgttttggtatttttttaagtatttaaaatgtattaatttattttaattaaattaaaatagatgtgttgagtaaaaagagttttggaattatagaaaatgtaaatgagttttagttttattgtgaattttgatttgtttttatagtttgaaatgagggggtttaataaaaatgatttttaaaggttattttaaggttaaattaagattttatatgtaaaaatttggttaataagtgttagtttggaagttttaagagtgatggggtagtttggattattttaaaaatatagaattttattaaaaaagaatgtatgatagtgtgttttagttttttttttttaatatatgtaaattttttattatgtttttttttaaaaggtttatatttttttaatatttggatataattgattaaattgaggtgaagtgtgtattattgtaaaagaaattattgaagagttttatttgttgttaaaagttttggttatttttaataaatttggagtaaataaaaatttaaatattttagttgagttttggggtaaaaatgatttttttagtgtttggttaaagggatttaaggatttattgggatttagtaaaagatgttttatgttttaaatatatttaaaattttaatataatattaaaagaaaagtgaggggttagtatgaaatttttgttaggggaaattttagttgtgtagttaaggaaattaggattttttggttaattatggggtttttgttgtagtttatagtttgatataaagttataagtttggagggttggtggtttatgtgtggattgaaagaattatgaaggtttggggaatgatattgatttgttaggtttattttatgttttatttattattattaaaagaggtttattgatagttttattagtaaaattagtaatagagttgtatgtttgtaatatatatatatgtgtgtgtgtgtatatatatatatatatttgtgggtttatgggaatattgagggagataatttttaggttaaaattatataaaaattatttgggaaatataaagatgtaagatataaaataaatttggagtgtaaatgtgtaagatatatttagtgggaatataaaagagaaaagtatagtggtttgataattgggatggtgtttggttttatgtggggttttaggtggttttattgttgtttgtatttggttagtttttgtagtttgtatgtgttttttgtggggtgtgtggttttttatggtgataaattgaattttgaattttgttgtagggattttatggttgataaggaggagtttggtgttgttatttatttgtggggttattgatttggaggtttgtgttttgttttggggtttttggtatgtttgggatttttgagggggtgtgtttgttgatttggttatttttgtggtgttgggtttttagtgtgttgttgttgttgttgttgttgtgttttttggggggagggattagtgttttggtgtgagtttagaggttgtttatttgtgttattttttatttgtgtttgttgtgttagtgttttagagtattgagggttgttgttgttgttgttgttttgttggttttggtgtttgtggttgtgttgttgttattttgattttagttggaagtgatgttgggtggtgaggtagtggtttgtggggttggggggttttgggatttttggtttttttatgattttagagtttggtttttgattttgtgttgttgtttaatggttattatttagttgttttttgtaggttattgtggattttatggtggtgttttgggaaggaattttggtggttggtgttgtggtaagtttgattgtattttagggttaggattttgtgtggtttaaagatttttaaagaattaaaaagattgaaggaggtgttgggggggtatgtttattgttggaggttattaaatatttgataagtatataaatgtagattttatatttttatgtttggatttatattaaaaagatttaattttaggtagatagatgtagttgttgggtttatttgttgttttagtatttaggagtagtgattaatgttgttttgtgtttgtgatgttttagtgtagtgtttttgagagtgtggtagtagttttgtttttaaggagtttgttgtttttaagtgggtaaataaatggattgtagagatgatgatttatagatgttttgatgaagatgaattgggtggaattggagatggttttttgatatttaagggtggaggtttagtatgtggttgaaaatgagttgagttggggagaagtataggttggagatgagttggaaagttgggagttgttgttatagatggtgtttggagtttttagtattttaagataaagtaattttttgagaatgaagttaggaagaatttgaatgtgatggttatgttggttatttgtagaaagtatttagtggaaaaataggatattaagggtaggtgtgtttttaaaa

SEQ ID NO: 957 - DNA, 2500 bp, Artificial Sequence
  chemically treated genomic DNA (Homo sapiens)
gatagtgtttttattattattaaaaaagtaattaattttaaattgtttttaaaaaagaaaatgtattttttattaaaattatttttatgatgattaataaaatataattaaattttagatttataatgtaaaaattttttaaataaaatagttaaggaaaagtgtaagtgaatagaaatagtgtgaatgtgtgtgtttggttataatagttggtaaaggtataagtgtttgtaggtgtggaggaggttgtagtagtttggggtggttgagggttaagatgtgttgttagttatagggaaggaattttaggatattgtttgaagagttaggtttttttatttgggagtttgttttttatgtgtgttagttatattttataaaagaaaagagagattttgtattaatttagttgagagtagttatgtagtaaaatgtgagttatttagtgtttaatgtttggggttaaaaaatagaggaaagaagaaggattaaaagtaaattagtttatgtattatttgtaaaagtttttaaaatgtgttttgttttttatttgttatatttttgtaggtgatagatgagtgaggatatttagagaaatttaggaataaattaggtttatttattggtgttgaggttagttttgaagatagaaaaatgttttatttttgtttgtattgtggttgtttgtggtttggttggggaggtggttgggagtgaggtttgattgtttttggtgtttttatttttttaggtgtagaaggtgtttatgaggatttttagtgtttgatgttgttatggtttgggattagaggtagggattagggagttaggaattgtgttgtttttgtttttgttttggtgtgagggaagttttttttatttgggtttagttttgtaggggggtgtgtggggttagattgtaaagtgaaggtgtgggttggggtgggttttgtggagataaaggttgggtttgtttgtttttagagggttttagtgtttgttaagaggaagtttttgaggtttgggtagggaagggggtatgggttttttagggtttgttggttgtagtaggaagttggttagggtatggttgtgagtggagtgggtagggtttttttaggagtgtgggtgaggttggtgttggaggggtgaggattgggtataagaagttttgtggttttgtttgggtagttgtaggttttttgtgtgttttgagtttttgtgttatgaagtttgttgtttttttggggttttgtgtggttttgttttgtagttttggtgagtgttttgggtttttggtgtgtatggtggggtttgaggttttggtgtttgttgtgtttttgttgttgtttgtgttgattgtggattttaggtttttttagttttgtttggtgtttagagggttttgttattttggggttttgtgtttgtagtttgtggttttttttttttagggttgtttttagttttgtgttgggatggaggttgtttttggtttggggatatttgtttgttttttgtttggagattggttttttattttgtaaggtgtagtgtgagtgtttttttttttgggggtttgttttggattttgtatagagtttattggtttttttgttatttttaggttattttggtgattttgtagtgttttttggtggggttgtttttttagatttgtttgtgttttgggggtttgtatttggtaggttttggtgtaggagggaggggtggttggggagttgggtagggtgtgatggtttttgggtgttttttgtgggggtgtgttttggatttgttttttggggattttggtgtgtaggtggtgatttttttttgtttgtttgtagttgttgtttttttagtgggtttggttaagtttgtggtttagtttgttgttgtgttggagttggtggtggaggttggggttgggattttggttaatttttttggtatttttaatttgttgaagtttttgttgagtagtttgggtatttttgtgaattattttatagagggtttttagaagtgtgtggttgagttgggtttttaggttgtgggggttgtgaaggttttgaaggttttgttggtaaagtgggtattttgggtgttttttttgtgtgggtatttttttttggttagttttaaaattgtattagaggtgttttggttttatgttagggttgttttttgttttgtttttttaagttttgtttttgggagaagtttgggtttttgggtgggaattgggtggggtgtatttgagttgtaggggtggggaaggtggagatggttttgtgtgggtgtgtgttttttggagatgttagtggaattgttttgtttttgttttttatagagttggttgttgttgtgtttttgtttgagtttttggtggtagggttgggggtatttaagtttggtttttgttttttagggggttttgatagtgtttggttgagttgagattggagtatttatatttgaggataagatgttgttt

SEQ ID NO: 958 - DNA, 2500 bp, Artificial Sequence
  chemically treated genomic DNA (Homo sapiens)
gggtagtgttttgtttttaggtgtagatgttttagttttggtttagttaaatattgttagggttttttggaaagtagaagttgagtttgagtgtttttagttttgttattaagaatttaggtgggggtgtggtagtggttggttttgtggggagtgggagtggggtggttttgttggtgtttttgggggatgtgtatttgtgtggggttatttttgttttttttgtttttgtagtttggatgtgttttatttagtttttatttggagatttgggttttttttagggatagggtttggaggggtaggatgggaaatagttttgatgtagggttgggatatttttggtgtagttttgaggttggttgggaagggatgtttgtgtaggaagggtatttggggtgtttattttattagtagggtttttagggtttttatggtttttatggtttggggatttagtttagttatatatttttgggagttttttatgaggtggtttatggggatgtttaggttgtttagtaggagttttagtgggttgagggtgttgagggggttggttagggttttggttttggtttttgttgttgattttagtgtagtgataggttgggttataggtttggttgagtttattaagaaagtagtagttgtaagtgaatagggaggggttattgtttgtgtgttggggtttttagaaggtaggtttaggatgtgtttttgtgggaggtgtttaggaattgttgtgttttgtttggttttttgattgttttttttttttgtgttgaggtttgttaggtgtgagtttttgggatataggtgggtttggggaggtggttttgttaggagatgttgtagggttattggagtggtttgagggtggtggaaggattggtgaattttgtgtagggtttgggataggtttttaagggaggggatatttgtgttgtgttttgtaggatgaggagttggtttttagatggggggtagatgggtgtttttaggttaggggtggtttttattttggtatgaggttggagatagttttgagagggggaggttgtgggttgtaggtgtggggttttggggtggtggagttttttgggtgttgggtgaggttggaaggatttgggatttatgattggtgtaggtagtggtgggggtgtagtgggtgttgaggttttaggttttattgtgtgtgttaggagtttggggtgtttattggagttgtaggatagggttatgtagagttttaggagggtggtgagttttatggtgtgggggtttggggtgtgtggggaatttgtggttgtttgggtaaggttatgaggttttttatatttggtttttgtttttttagtgttggttttgtttgtgtttttgagaaagttttgtttgttttgtttatggttgtgttttggttaattttttgttgtggttggtgggttttgggaagtttgtgtttttttttttgtttgggttttgaggatttttttttggtaggtgttggggttttttgagagtaggtaggtttggtttttgtttttgtgaggtttattttggtttgtatttttgttttgtggtttgattttatgtgtttttttgtagggttgggtttgggtgaggggagttttttttgtgttagggtaggggtgggggtggtgtagtttttggttttttggtttttgtttttgattttagattgtggtaatgttgggtattgggggtttttgtgggtgttttttgtgtttggggaggtggaggtgttagggatgattaggttttatttttggttgtttttttggttgggttataggtagttatagtgtaaatagaagtggggtgtttttttgtttttgaaattagttttgatgttagtggatgggtttggtttgtttttgagtttttttaaatgtttttatttgtttgttatttgtagaagtatgatagatggagagtaaagtatattttgaaaatttttgtaaatgatatataaattaatttgtttttagtttttttttttttttttattttttgattttaggtattgagtattgagtgatttatgttttgttgtgtggttgtttttagttaggttggtgtaaagtttttttttttttttgtaaagtgtagttggtatgtgtgggaaataggtttttgggtgggaggatttgattttttaggtagtgttttggaattttttttttatggttgatagtatgttttagtttttagttattttgagttattgtggttttttttgtatttgtagatatttgtgtttttgttaattgttgtggttaggtatatgtatttatattgtttttgtttatttatatttttttttgattattttgtttgggggatttttgtattataaatttggagtttggttgtgttttgttggttattatggaagtaattttaatgggaaatatgtttttttttttaaaaatagtttgaagttaattatttttttggtggtggtaaagatattgtt

SEQ ID NO: 959 - DNA, 2001 bp, Artificial Sequence
  chemically treated genomic DNA (Homo sapiens)
gtattatggtggttgtttttttttgttttgtgtagtggattttttggtttttttttagttttggggtttttatagtttttggtttggtttttttttttatagttaggttttgggtaattttaggggaaagtgattttgaggttttttatttttttttgtgttttgtataggttttgggtttttggtggtgttgtttgttgtagttttatgtttttttgggagagtggtttaggtttttttttttgagtgtgattgtgttgttgtttgtgaggtttgtgtgggttttttttgggttgtttttgttgggatggggattggtggttttgggttatgttttggatttggtttgttttttggtataagtttgtatgggttatggttaggtaggagggtgggtggtggggttttgggggtgttgagtttggggttgtgtggtttttaagagtaggttgtgtgtgtttttgttggagttttatgaaggtggtttagggttatttttgagggtgtgtgggtttgatttgtgttttggatttagtttgtggttaggaatgtaggtgttttagggtgttaaaaggaaaatgtataaggttttgttgaggagggggggttaggaggggattgggggtgggaagaatgtgggggagagggatggtagggtgtttgtttgagggattgatatttttgtgagtggtattttaggatgttgatgttggtgggggtgggggtttgaggggtggttggggttagggggtggttttaggggtagggttgtagtatgaggggttgtgtgattttggtggtgattgggtggggagaggttggtgttggggttgggagatggttgtgggtgggagggtgttttgtggggatgtttttgttgtagtgtttggttatgtgtgaggttttgtttttaggatgtgtttggtgggatggatttgtttattttgtagttgtgtgtttgttgtgttgttttgtgggtgttgtagttttggagtttgtgtgtgtggggttgggtttgggagttttagggtagttgttttgttgagttgtaggtattggtggggaatggggttatggggttgtgtgttgggggttgtggggtgttttggggttttggggtgagtgtggggtgtgggttgaggtttgtagggttttgtgaggtgagtgtgggggttggtgttggggtttgtggggttttggggagggtgtggggtgtgggttggggtttgtggtttgtagtttggggtttgtggggttttggggagggtgtggggtgtgggttggggtttgtggtttgtagtttggggtttggggggttttggggagggtgtggggtgtggttggggtttgtggtttgtagtttggggtttggggggttttggggagggtgtggggtgtgggttggggtttttgtgggggttgtggtggtttgggtgtttggtagaattgttgttgtgtagtgggttttttgttgtttgttttttgttgtagtttgtgaatggggtggggagttttggtttttagtttgttttttgtgttattttggggtgttaagttttatttttgggtttggaggaaagtgtggatttggtgtttgtgtttaggtatgtgttgttttgggatgggttagttggtgggtgaattttgttagttatgtgtggggtgggtttttggtatatttttagattattgttttttgtgttagaagttttgtaggtgtaatttttttttggagtagttgtgggtgtggatttagtggagtaattttgaggtgttttagagagagtttggatagttgttggagttttttttgagtgggtttttttaatattgttatagtaggaaagttatttttttagggttttgtttattggaaatttttgttttggggagtttggtttgtttggttttaggatataggttaattaagttggttttgaaatttagaatgtatttagagggaaggtgggataaagtttttggaggtgtttgttggttgtt

SEQ ID NO: 960 - DNA, 2001 bp, Artificial Sequence
  chemically treated genomic DNA (Homo sapiens)
ggtggttaataggtgtttttaaggattttattttattttttttttggatgtattttggattttggggttagtttagttggtttgtgttttgaggttaggtaggttagattttttaggataggagtttttgatggataggattttagggggatggtttttttgttgtagtggtgttggaaggatttatttgggaaaggttttagtggttgtttaggttttttttgagatgttttgggattgttttgttggatttgtatttatagttgttttaaggggaagttgtatttataaagtttttggtataggagataatggtttggagatgtgttaggggtttgttttatgtgtggttggtagggtttatttattggttggtttgttttgaagtaatatgtgtttgggtgtgaatgttggatttatgtttttttttagatttgggggtgggatttggtgttttaggatgatgtggagggtaggttgggggttgggattttttattttatttgtaggttgtggtggaaagtgagtggtgggaaatttgttgtatagtaatggttttgttaggtgtttgggttattgtgatttttgtggagattttggtttatgttttgtattttttttagggttttttagattttaggttgtagattgtagattttggttatgttttgtattttttttagggttttttagattttaggttgtagattgtagattttggtttatgttttgtattttttttagggttttgtggattttaggttgtagattgtagattttggtttatgttttgtattttttttagggttttgtggattttagtgttagtttttatatttattttatagggttttgtaaattttggtttgtgttttgtatttattttagggttttgagatattttgtagtttttgatatgtggttttgtggttttgttttttattggtatttgtgatttggtggggtggttgttttggggtttttggatttggttttgtgtatgtggattttgggattatagtgtttataaggtggtgtggtgggtgtgtggttgtggggtgggtgggtttgttttgttgaatgtgttttgagggtggggttttgtgtgtggttgggtgttgtggtaggagtgtttttatggggtatttttttatttatggttgttttttagttttggtgttggtttttttttatttggttattgttggggttatgtggttttttgtgttgtggttttatttttggggttgttttttgattttgattgttttttgggtttttatttttgttggtgttagtattttggggtgttatttgtggaggtgttggttttttgggtgggtattttgttattttttttttttgtgttttttttatttttggtttttttttgattttttttttttgatgaggttttgtgtgttttttttttggtattttggaatatttgtatttttggttgtaagttggatttgggatgtgggttgggtttatgtgtttttaggggtggttttgggttgtttttgtggggttttaatagggatatgtatagtttgtttttggggattgtatggttttgaatttggtgtttttgggattttgttgtttgtttttttgtttgattgtgatttgtatgggtttgtattaaggagtaagttggatttaggatgtggtttggggttattagtttttattttagtagggatagtttgggggagatttgtgtaggttttgtagatggtagtgtagttatatttaggaaggggggtttgggttatttttttaggaaggtgtggggttgtggtagatagtattgttgaaagtttaaggtttgtgtaggatatggggagaagtggggggttttagggttatttttttttggagttatttagggtttggttatggggagggaagttaagttgagggttgtgggggttttaaggttaaggaggagttaggaagtttattgtatagaatagaaggggatggttattgtggtat

SEQ ID NO: 961 - DNA, 934 bp, Artificial Sequence
  chemically treated genomic DNA (Homo sapiens)
tgttgttgttattgtaaagatgttgttaaggataaaagtttatgtagatgttttgggtttgggtaattttatttttgtgtattgtttttttagatttttaagtttttttttttattttttataattttatttagggtttagagtaggtgattgtagtgatttggttttaataaaattgaaagtaaatgttttttgtgaaaagttttgggttgtaaattagaaatgtttatgttgattttttattgtatggaaaaagtttttgggtgaaatagttttgagtttgagaatgatttaaaaagttggagttgtgtatatagttttgagtgtttgaagttgtttaattattgtgtgattagaaagaagagtgatgtggtaggaagaagaagttgggttttggggagagtggaggtgggttagggtgggtaaaggtagttgatgttaggaatataattgttttttgtgttgttttaaattaagagatggtagtggttttttagtgtattgttggaagtgtgttttagtagatagggtgtgggtaagatgtgtgggtagatagtttgtatttgttatatgtgttggggtgtgagatttagatttgtgttattttggtttttattttttattttttgtttttgtttgtaatgtttagagattgtttttttttttttatatttatggttttgttatttgaaggaaagggttggttggttagtatttattgaataaagattgggtgttgtaggtagtattaaaattaagattatttgagaaatttagagaaaattgagggatagtgatgggtttagggttggataaggaataatgagttttttttttttttttttatagatgttttttttatgtgggaatttggtttttttttttttgatgtagagagagaagtgattttataggtggaaaatttgagattggt

SEQ ID NO: 962 - DNA, 934 bp, Artificial Sequence
  chemically treated genomic DNA (Homo sapiens)
gttggttttagattttttatttgtggaattgtttttttttttgtgttggaagaaggaggattgggtttttgtgtgaaggaggtgtttgtggggagggaggagaagggtttattattttttatttagttttagatttattgttgttttttggttttttttaagttttttaaatagttttaattttggtgttgtttatgatgtttagtttttgtttggtagatgttggttaattagtttttttttttaaatgatagggttgtggatgtaaaagaggaaaaatagtttttgagtgttatgaatagagatagggaatggggaatgaaagttgagatggtgtagatttagattttgtattttagtatatgtggtgagtgtggattgtttgtttgtgtattttgtttatattttgtttattggagtatatttttagtagtgtgttgggaaattgttgttattttttagtttggaatggtgtgaagggtggttgtatttttggtattggttgtttttgtttattttgatttgtttttgttttttttaagatttggttttttttttttgttgtgttatttttttttttggttatataatggttaaataattttaaatgtttagagttgtgtatatagttttagttttttaaattgtttttgggtttaaagttgttttgtttaggagttttttttatataatgggaaattagtataaatatttttaatttatagtttgggattttttataggagatgtttatttttgattttattggaattaaattgttgtagttatttgttttgagttttgaatggaattgtgagaaatggagggggaagtttaggggtttggggaagtagtgtgtaggaataagattgtttaaatttgaagtatttgtatgggtttttatttttggtaatatttttgtaataataatagta

SEQ ID NO: 963 - DNA, 2001 bp, Artificial Sequence
  chemically treated genomic DNA (Homo sapiens)
gatttgggtgtaggatattttttaaatagttttttattttatttatgaaataggttagttttggtttagtaaatttgttgtgtaatgattttttaatgagttaggttggttttaagtttttggttattttgttgtaattagttaggttttgttttttgaagggttatttgggattgttgtgtagtagatttttttttaatgttttagaattaggtgttttttttgattttgtgtggttttattgaattaaatttagtaagttatagaggtttttagatttttaagatataatatttaaaggtgaggtaggttgtgaaaagtttagtggtttttggttgtttttgaatgtgattatttgtaggttggttttgagaatttggttagagttgtgttaggaaaatggtttttgggaagttttttagagagtagaatgaggaggtggattttgtgtgaaggaatattttgtgtggttttggtggttaggaaagagttggtataagttgaaagaaggtttgtggtgaagtggagggggatttaagttagggatttttatttgtttttaggaaggatgaaaaggagataaaaattttaaagggaaaagttttttaggttgtaggttaatgagtggtgggaaggaggagtgaggttggggaattttttttagagttagttagagtggatggttgttgggaagttaattagtgtgtttgagtttgtagtttttttgtagtagttatgttagagtgttttgtgtagagtggttgtgagtgggtagttgggtttggttgttgggagttattgtgtgggttttgtattttttttttgtattgtttttgtttggtttttgtgttgtggtgttttagtggtttttgttgtgttttatgttgtgtttttgtattttgttggttattggttgtataattgttattgttttttggttgtgtggtttgttttgttttgttttgtttttttttgttttgttttattttagttagttttgttttgttttgtgttgttaagtggtttttgtttttgtttagtgtttaggtagttgtgaggaaatttttgtagtggttgggtagtagtatgttttttgttttttagggttattgttaggtttgttgagttttgggattgtttttgttttggttgttatttttttgtgtttttttagttttttgtgaagtaggatggttgggattgtgtgtattgtgtgtttggtggtggtgatgttgtttagtttggattttttgggataggtgtagtttttgttgttgttgttggatgttatttgttattaagtttgtttttttttttagagattgtagtttggatttaagtgggtgttagaaatttttgtgttaggtgaggaggggttttttgagtgtgtttagtgtttagtggggagtaaggtgtgtgtggtggttgtattttgagtgtgttagttttgttgggttgtagttgtgtgttttgtagttgggtatttgggagtggttggtgtgtttggggtttggttgggtttattgagggagggagagagggtgtgtgtggatggagtttatattttttagttttatgttgttgttagggaaggtgtgagtgggaggaattgtggggattgtttttttgtgagtgtttgttttttggaagggtgagaaggtgggagttatttttttgggtttttgtgaattggtgttttatagttgagttggtgttttatgaatttgttatttttgtttgtatatatgtgttagaattttagttttagttggattatagttttagttattttttttttaatgtatttttattttttgttgtttttatttagtttgggttttttaagtttatgggtttaagtgtaagtaaagttgaggatagatttttgagtttgtagtggtgggtgaagatatattgaggtaaatttttgagtaagagggtttttaaaatgaggagattgaatttttttttttaaaatagtattttttatataggttagtg

SEQ ID NO: 964 - DNA, 2001 bp, Artificial Sequence
  chemically treated genomic DNA (Homo sapiens)
tgttaatttatataagggatgttgttttgaaggaaaaggtttagtttttttattttggggatttttttatttaaaagtttgttttagtgtgtttttatttgttattgtagatttagaaatttgtttttaattttgtttgtatttgggtttgtgagtttaggaaatttaggttgggtaaaggtggtggggggtgggggtatgttggggaagggatggttggagttgtggtttagttaaggttgaaattttgatatgtatgtgtgagtaaggatggtaaatttatgaggtattagtttggttgtggggtgttagtttgtagagatttgggaaaatagtttttatttttttgtttttttaaaaaatgggtgtttatgagaaggtgatttttatggttttttttgtttatattttttttgatagtagtgtgagattgggggatgtgggttttgtttatatatatttttttttttttttttagtagatttagttaggttttaggtatattgattatttttaagtgtttagttgtagggtgtatgattatagtttggtggggttagtgtgtttagggtatagttattatgtgtgttttgttttttgttgggtgttaggtatgtttaagggatttttttttatttggtatgggagtttttggtatttatttgagtttgggttgtagtttttggaagaaggagtggatttggtgataggtggtgtttggtggtggtggtgggggttgtgtttgttttgggaagtttaagttgagtagtattgttattattaagtatgtggtgtgtatggttttggttattttgttttgtagggagttaggagagtgtgggagagtggtagttggagtgagagtagttttaggatttggtaagtttggtagtggttttgaggagtaagagatgtgttgttatttagttgttgtaaaagtttttttgtagttatttgggtgttgggtgagggtgggaattgtttggtggtgtggggtagggtggggttgattggggtggggtggggtgaggagggatggggtggggtgaggtgagttgtgtggttagggggtggtggtggttgtgtggttggtagttggtggggtgtgggggtgtggtgtggagtgtggtgggggttattggggtattgtggtgtggggattgggtgaaggtagtgtgagaggagggtgtggagtttgtgtggtggtttttggtagttgagtttagttgtttgtttgtagttgttttatatagggtgttttggtataattattgtagaggggttgtaggtttgagtgtgttgattggttttttagtagttgtttgttttgattggttttgggagaagttttttagttttattttttttttttgttgtttattggtttatagtttggagggtttttttttttaggatttttgttttttttttattttttttgggggtaggtgggggtttttgatttaggtttttttttgttttgttataggtttttttttagtttgtgttagtttttttttggttattagagttatataaggtgtttttttatataaaatttatttttttattttattttttgaggagttttttgggaattgtttttttaatgtagttttgattgggtttttaaagttaatttgtaaatagttgtgtttagggatagttagggattgttgggttttttatagtttgttttatttttgaatattgtattttaaaagtttgaaagtttttgtggtttgttagatttgatttagtagagttatataaagttagagaaagtatttgattttggggtgttaaaagaaaatttattgtatgatagttttaggtggttttttaagaggtaaagtttaattggttataatgaaataattaggggtttaaagttagtttaatttattagaaaattattatatagtaaatttattgagttaaagttagtttattttatagatggagtagaaggttatttgaaaggtattttatatttaaatt

SEQ ID NO: 965 - DNA, 22 bp, Artificial Sequence
  Detection primer for MSF
tggagattattgtgtgagtttt

SEQ ID NO: 966 - DNA, 19 bp, Artificial Sequence
  Detection primer for MSF
aataaacaaccctcccctc

SEQ ID NO: 967 - DNA, 19 bp, Artificial Sequence
  Detection primer for SEQ ID NO:14
aaaaaggggattagtgggt

SEQ ID NO: 968 - DNA, 22 bp, Artificial Sequence
  Detection primer for SEQ ID NO:14
ccaaaaacctctacattcaaac

SEQ ID NO: 969 - DNA, 25 bp, Artificial Sequence
  Detection primer for SEQ ID NO:15
attttaggtgtaagtttaaggttgt

SEQ ID NO: 970 - DNA, 18 bp, Artificial Sequence
  Detection primer for SEQ ID NO:15
atctacctttccccaccc

SEQ ID NO: 971 - DNA, 19 bp, Artificial Sequence
  Detection primer for SEQ ID NO:16
agggaaaggaggtagaggt

SEQ ID NO: 972 - DNA, 22 bp, Artificial Sequence
  Detection primer for SEQ ID NO:16
acacaactaaaaccctcaaatc

SEQ ID NO: 973 - DNA, 27 bp, Artificial Sequence
  Detection primer for SEQ ID NO:17
agtaggaattgtttatagatatgttga

SEQ ID NO: 974 - DNA, 18 bp, Artificial Sequence
  Detection primer for SEQ ID NO:17
atcacaccctcccaaaac

SEQ ID NO: 975 - DNA, 23 bp, Artificial Sequence
  Detection primer for SEQ ID NO:18
tgttttaggtttgatggattaga

SEQ ID NO: 976 - DNA, 18 bp, Artificial Sequence
  Detection primer for SEQ ID NO:18
actccccaaaatcccact

SEQ ID NO: 977 - DNA, 21 bp, Artificial Sequence
  Detection primer for SEQ ID NO:19
aatgagagggaaaatgaaagt

SEQ ID NO: 978 - DNA, 20 bp, Artificial Sequence
  Detection primer for SEQ ID NO:19
aaaaccccatctctacaacc

SEQ ID NO: 979 - DNA, 21 bp, Artificial Sequence
  Detection primer for PRDM6
ggaggagaggatgaagtttta

SEQ ID NO: 980 - DNA, 22 bp, Artificial Sequence
  Detection primer for PRDM6
acttccaatcttaaaaaccaaa

SEQ ID NO: 981 - DNA, 18 bp, Artificial Sequence
  Detection primer for RAP2B
aggggtaggggagtgttt

SEQ ID NO: 982 - DNA, 24 bp, Artificial Sequence
  Detection primer for RAP2B
ctcaacctacaaacaaatcttaac

SEQ ID NO: 983 - DNA, 21 bp, Artificial Sequence
  Detection primer for NR2E1
ggtggagggaagattagtgta

SEQ ID NO: 984 - DNA, 18 bp, Artificial Sequence
  Detection primer for NR2E1
cacccctacaacccaaac

SEQ ID NO: 985 - DNA, 23 bp, Artificial Sequence
  Detection primer for NR2E1
ggttgttgaaagaagttagtttg

SEQ ID NO: 986 - DNA, 19 bp, Artificial Sequence
  Detection primer for NR2E1
ccttaaaaacctccaaccc

SEQ ID NO: 987 - DNA, 24 bp, Artificial Sequence
  Detection primer for PCDH7
aattttagagagttggagaaagat

SEQ ID NO: 988 - DNA, 21 bp, Artificial Sequence
  Detection primer for PCDH7
tcaattcaaaaacacaaccaa

SEQ ID NO: 989 - DNA, 25 bp, Artificial Sequence
  Detection primer for DKK3
taggtatagtagggtggttttaagt

SEQ ID NO: 990 - DNA, 22 bp, Artificial Sequence
  Detection primer for DKK3
aaaactccaacatcacaaataa

SEQ ID NO: 991 - DNA, 22 bp, Artificial Sequence
  Detection primer for RTTN
gtgattttagagaggttggaag

SEQ ID NO: 992 - DNA, 23 bp, Artificial Sequence
  Detection primer for RTTN
ttcaaaaacaaaccactaatacc

SEQ ID NO: 993 - DNA, 18 bp, Artificial Sequence
  Detection primer for BCL11B
tatgggattggaagggat

SEQ ID NO: 994 - DNA, 22 bp, Artificial Sequence
  Detection primer for BCL11B
ccccaaactataaccaacttta

SEQ ID NO: 995 - DNA, 22 bp, Artificial Sequence
  Detection primer for COL5A1
gattagtaggaggggttgttta

SEQ ID NO: 996 - DNA, 23 bp, Artificial Sequence
  Detection primer for COL5A1
aaatcccacatctacatatcatc

SEQ ID NO: 997 - DNA, 18 bp, Artificial Sequence
  Detection primer for SEQ ID NO:51
gtaggggtggagtgaagg

SEQ ID NO: 998 - DNA, 22 bp, Artificial Sequence
  Detection primer for SEQ ID NO:51
cactcaaaactcccaaataaaa

SEQ ID NO: 999 - DNA, 24 bp, Artificial Sequence
  Detection primer for MGC34831
aatgagagtagggtttgaaattag

SEQ ID NO: 1000 - DNA, 22 bp, Artificial Sequence
  Detection primer for MGC34831
tatccaaaaacttcacctcaac

SEQ ID NO: 1001 - DNA, 22 bp, Artificial Sequence
  Detection primer for SEQ ID NO:54
tgggatgaagaagtagtgtgtt

SEQ ID NO: 1002 - DNA, 27 bp, Artificial Sequence
  Detection primer for SEQ ID NO:54
ctccaactaaacattaaataaatctca

SEQ ID NO: 1003 - DNA, 21 bp, Artificial Sequence
  Detection primer for PDLIM1
ggtttatttgttgggtggtta

SEQ ID NO: 1004 - DNA, 23 bp, Artificial Sequence
  Detection primer for PDLIM1
ctatcaaaacctacttccctctc

SEQ ID NO: 1005 - DNA, 22 bp, Artificial Sequence
  Detection primer for KOX7
gaggttaagggatggttttatt

SEQ ID NO: 1006 - DNA, 19 bp, Artificial Sequence
  Detection primer for KOX7
accaccacaaatatcccaa

SEQ ID NO: 1007 - DNA, 21 bp, Artificial Sequence
  Detection primer for SEQ ID NO:3
gtaggggagggaagtagatgt

SEQ ID NO: 1008 - DNA, 23 bp, Artificial Sequence
  Detection primer for SEQ ID NO:3
tcctcaactctacaaacctaaaa

SEQ ID NO: 1009 - DNA, 18 bp, Artificial Sequence
  Detection primer for SEQ ID NO:4
tgtttgggttagatgggg

SEQ ID NO: 1010 - DNA, 22 bp, Artificial Sequence
  Detection primer for SEQ ID NO:4
attctcaaccaccaaaatctac

SEQ ID NO: 1011 - DNA, 24 bp, Artificial Sequence
  Detection primer for SEQ ID NO:1
ttagaagtgaaagtagaagggttt

SEQ ID NO: 1012 - DNA, 22 bp, Artificial Sequence
  Detection primer for SEQ ID NO:1
cctctaattcctatcaatcacc

SEQ ID NO: 1013 - DNA, 21 bp, Artificial Sequence
  Detection primer for SEQ ID NO:9
gaaaggagaggttaaaggttg

SEQ ID NO: 1014 - DNA, 21 bp, Artificial Sequence
  Detection primer for SEQ ID NO:9
aactcacttaactccaatccc

SEQ ID NO: 1015 - DNA, 22 bp, Artificial Sequence
  Detection primer for SEQ ID NO:5
ataaggggaattgttgtaggtt

SEQ ID NO: 1016 - DNA, 22 bp, Artificial Sequence
  Detection primer for SEQ ID NO:5
ttctattaaaacccaactcctc

SEQ ID NO: 1017 - DNA, 22 bp, Artificial Sequence
  Detection primer for SEQ ID NO:6
agggagttaagtaaggggttag

SEQ ID NO: 1018 - DNA, 22 bp, Artificial Sequence
  Detection primer for SEQ ID NO:6
aacaccaacaaaatatccatct

SEQ ID NO: 1019 - DNA, 22 bp, Artificial Sequence
  Detection primer for SEQ ID NO:8
tagtagtttgaagaaggggaag

SEQ ID NO: 1020 - DNA, 23 bp, Artificial Sequence
  Detection primer for SEQ ID NO:8
aaacattcctaaaatcacaaaaa

SEQ ID NO: 1021 - DNA, 22 bp, Artificial Sequence
  Detection primer for SEQ ID NO:6
agatggatattttgttggtgtt

SEQ ID NO: 1022 - DNA, 25 bp, Artificial Sequence
  Detection primer for SEQ ID NO:6
tacacaattatacctttcaaacaat

SEQ ID NO: 1023 - DNA, 25 bp, Artificial Sequence
  Detection primer for SEQ ID NO:7
gaagttgttgtatatgaggttgtta

SEQ ID NO: 1024 - DNA, 21 bp, Artificial Sequence
  Detection primer for SEQ ID NO:7
caaacccaattctcaatatcc

SEQ ID NO: 1025 - DNA, 21 bp, Artificial Sequence
  Detection primer for PROSTAGLANDIN E2 RECEPTOR, EP4 SUBTYPE (PROSTANOID EP4 RECEPTOR) (PGE RECEPTOR, EP4 SUBTYPE)
gaagaggaatgggaaaattag

SEQ ID NO: 1026 - DNA, 19 bp, Artificial Sequence
  Detection primer for PROSTAGLANDIN E2 RECEPTOR, EP4 SUBTYPE (PROSTANOID EP4 RECEPTOR) (PGE RECEPTOR, EP4 SUBTYPE)
tcaccaacaaaatacccaa

SEQ ID NO: 1027 - DNA, 24 bp, Artificial Sequence
  Detection primer for PROSTAGLANDIN E2 RECEPTOR, EP4 SUBTYPE (PROSTANOID EP4 RECEPTOR) (PGE RECEPTOR, EP4 SUBTYPE)
tgagtaagatgattatttggattt

SEQ ID NO: 1028 - DNA, 22 bp, Artificial Sequence
  Detection primer for PROSTAGLANDIN E2 RECEPTOR, EP4 SUBTYPE (PROSTANOID EP4 RECEPTOR) (PGE RECEPTOR, EP4 SUBTYPE)
aaccatcaaccatacctatttc

SEQ ID NO: 1029 - DNA, 21 bp, Artificial Sequence
  Detection primer for ORPHAN NUCLEAR RECEPTOR NR5A2 (ALPHA-1-FETOPROTEIN TRANSCRIPTION FACTOR) (HEPATOCYTIC TRANSCRIPTION FACTOR) (B1-BINDING FACTOR) (HB1F) (CYP7A PROMOTER BINDING FACTOR)
gtgtgaggtttgggtattttt

SEQ ID NO: 1030 - DNA, 19 bp, Artificial Sequence
  Detection primer for ORPHAN NUCLEAR RECEPTOR NR5A2 (ALPHA-1-FETOPROTEIN TRANSCRIPTION FACTOR) (HEPATOCYTIC TRANSCRIPTION FACTOR) (B1-BINDING FACTOR) (HB1F) (CYP7A PROMOTER BINDING FACTOR)
ccactcactcaacccataa

SEQ ID NO: 1031 - DNA, 20 bp, Artificial Sequence
  Detection primer for LIM DOMAIN KINASE 1 (EC 2.7.1.37) (LIMK-1)
agggaggtttggtgtatttt

SEQ ID NO: 1032 - DNA, 22 bp, Artificial Sequence
  Detection primer for LIM DOMAIN KINASE 1 (EC 2.7.1.37) (LIMK-1)
aaaccctacttcctacaaacaa

SEQ ID NO: 1033 - DNA, 21 bp, Artificial Sequence
  Detection primer for HOXB13
gagagggatatgagggttttt

SEQ ID NO: 1034 - DNA, 22 bp, Artificial Sequence
  Detection primer for HOXB13
ctcacactctttaaccttttcc

SEQ ID NO: 1035 - DNA, 25 bp, Artificial Sequence
  Detection primer for SEQ ID NO:35
gtttattggtttttatagattaagg

SEQ ID NO: 1036 - DNA, 22 bp, Artificial Sequence
  Detection primer for SEQ ID NO:35
taaatcccccaacacatactac

SEQ ID NO: 1037 - DNA, 22 bp, Artificial Sequence
  Detection primer for SEQ ID NO:36
aggggtgagttttattagaggt

SEQ ID NO: 1038 - DNA, 19 bp, Artificial Sequence
  Detection primer for SEQ ID NO:36
ctaaaccccaatctctcca

SEQ ID NO: 1039 - DNA, 18 bp, Artificial Sequence
  Detection primer for MGC10561
tttttgggagggaagagt

SEQ ID NO: 1040 - DNA, 22 bp, Artificial Sequence
  Detection primer for MGC10561
aaaaccataaaatcccacataa

SEQ ID NO: 1041 - DNA, 22 bp, Artificial Sequence
  Detection primer for LMX1A
tgaatgtggaggatgagatagt

SEQ ID NO: 1042 - DNA, 22 bp, Artificial Sequence
  Detection primer for LMX1A
aacaacactcttacccttatcc

SEQ ID NO: 1043 - DNA, 22 bp, Artificial Sequence
  Detection primer for SENP3
ggttaaggaaggtaggagattt

SEQ ID NO: 1044 - DNA, 22 bp, Artificial Sequence
  Detection primer for SENP3
cttccaaactaaaaaccacttt

SEQ ID NO: 1045 - DNA, 20 bp, Artificial Sequence
  Detection primer for GS1
gttttggagattagttgggg

SEQ ID NO: 1046 - DNA, 24 bp, Artificial Sequence
  Detection primer for GS1
atcaccattcaaaatacaaatatc

SEQ ID NO: 1047 - DNA, 21 bp, Artificial Sequence
  Detection primer for TITF1
gagagaaagaagttgggtgat

SEQ ID NO: 1048 - DNA, 22 bp, Artificial Sequence
  Detection primer for TITF1
cttactccctcaatacaaaacc

SEQ ID NO: 1049 - DNA, 22 bp, Artificial Sequence
  Detection primer for SEQ ID NO:42
gagaaaaagagggagattattg

SEQ ID NO: 1050 - DNA, 22 bp, Artificial Sequence
  Detection primer for SEQ ID NO:42
ccacattcaaaaacacaaatac

SEQ ID NO: 1051 - DNA, 19 bp, Artificial Sequence
  Detection primer for DDX51
tttaggggtttggattttg

SEQ ID NO: 1052 - DNA, 22 bp, Artificial Sequence
  Detection primer for DDX51
caaactcactctataacctccc

SEQ ID NO: 1053 - DNA, 21 bp, Artificial Sequence
  Detection primer for SEQ ID NO:117
ggttagggtgggtaaaggtag

SEQ ID NO: 1054 - DNA, 22 bp, Artificial Sequence
  Detection primer for SEQ ID NO:117
cctttccttcaaataacaaaac

SEQ ID NO: 1055 - DNA, 23 bp, Artificial Sequence
  Detection primer for Q8NAN2
ttgtataggaaagtaggagggtt

SEQ ID NO: 1056 - DNA, 23 bp, Artificial Sequence
  Detection primer for Q8NAN2
aaacaaaataatctttcacatcc

SEQ ID NO: 1057 - DNA, 24 bp, Artificial Sequence
  Detection primer for SEQ ID NO:45
agggtgatagtataaaggaaattg

SEQ ID NO: 1058 - DNA, 20 bp, Artificial Sequence
  Detection primer for SEQ ID NO:45
caaaacaaattaactccccc

SEQ ID NO: 1059 - DNA, 27 bp, Artificial Sequence
  Detection primer for SEQ ID NO:46
tggaagataatgtgttatttagtattt

SEQ ID NO: 1060 - DNA, 20 bp, Artificial Sequence
  Detection primer for SEQ ID NO:46
tcctctacccttcacctacc

SEQ ID NO: 1061 - DNA, 24 bp, Artificial Sequence
  Detection primer for O60279
ttaaaagggaatggatatagagtt

SEQ ID NO: 1062 - DNA, 22 bp, Artificial Sequence
  Detection primer for O60279
actttcctaaaatctccaaaaa

SEQ ID NO: 1063 - DNA, 22 bp, Artificial Sequence
  Detection primer for SEQ ID NO:48
tatttttggggatgaagaaaat

SEQ ID NO: 1064 - DNA, 23 bp, Artificial Sequence
  Detection primer for SEQ ID NO:48
acaaaatctcctttcatttaaca

SEQ ID NO: 1065 - DNA, 22 bp, Artificial Sequence
  Detection primer for SEQ ID NO:2
atatgggattgatggaagatag

SEQ ID NO: 1066 - DNA, 23 bp, Artificial Sequence
  Detection primer for SEQ ID NO:2
tccaataaacacaaacctaaatc

SEQ ID NO: 1067 - DNA, 22 bp, Artificial Sequence
  Detection primer for SNAP25
agaaagagggggttttattatt

SEQ ID NO: 1068 - DNA, 22 bp, Artificial Sequence
  Detection primer for SNAP25
actccaccacaattacaaccta

SEQ ID NO: 1069 - DNA, 22 bp, Artificial Sequence
  Detection primer for SEQ ID NO:26
ggaggtgtgattttattgtttg

SEQ ID NO: 1070 - DNA, 21 bp, Artificial Sequence
  Detection primer for SEQ ID NO:26
ctttacccatcaacaacccta

SEQ ID NO: 1071 - DNA, 25 bp, Artificial Sequence
  Detection primer for GIRK2
ttttaagagaggagattatgattga

SEQ ID NO: 1072 - DNA, 22 bp, Artificial Sequence
  Detection primer for GIRK2
accttccacaaaaacaataaac

SEQ ID NO: 1073 - DNA, 22 bp, Artificial Sequence
  Detection primer for SEQ ID NO:28
gttgagaggtaaggtatgaagg

SEQ ID NO: 1074 - DNA, 25 bp, Artificial Sequence
  Detection primer for SEQ ID NO:28
ttaattcccctctttaacctaataa

SEQ ID NO: 1075 - DNA, 20 bp, Artificial Sequence
  Detection primer for SEQ ID NO:28
tttttaagggaaagtggagg

SEQ ID NO: 1076 - DNA, 25 bp, Artificial Sequence
  Detection primer for SEQ ID NO:28
tacaaaaataaactcaaaatcccta

SEQ ID NO: 1077 - DNA, 21 bp, Artificial Sequence
  Detection primer for SEQ ID NO:29
gagagaaatgggtgatgaagt

SEQ ID NO: 1078 - DNA, 18 bp, Artificial Sequence
  Detection primer for SEQ ID NO:29
cccaacaaataaaacccc

SEQ ID NO: 1079 - DNA, 20 bp, Artificial Sequence
  Detection primer for ARL7
ttgaatgtaaggagaggtgg

SEQ ID NO: 1080 - DNA, 23 bp, Artificial Sequence
  Detection primer for ARL7
aaatctctacacccaaatacaaa

SEQ ID NO: 1081 - DNA, 22 bp, Artificial Sequence
  Detection primer for SEQ ID NO:31
tttttggagatagtaggaaggg

SEQ ID NO: 1082 - DNA, 23 bp, Artificial Sequence
  Detection primer for SEQ ID NO:31
ctcaacaaataaacttcacaaaa

SEQ ID NO: 1083 - DNA, 20 bp, Artificial Sequence
  Detection primer for THH
gttttaggaaagggagaggg

SEQ ID NO: 1084 - DNA, 22 bp, Artificial Sequence
  Detection primer for THH
ttaattcactcccaccaataaa

SEQ ID NO: 1085 - DNA, 22 bp, Artificial Sequence
  Detection primer for APC
tcaactaccatcaacttcctta

SEQ ID NO: 1086 - DNA, 25 bp, Artificial Sequence
  Detection primer for APC
aatttatttttagtgttgtagtggg

SEQ ID NO: 1087 - DNA, 20 bp, Artificial Sequence
  Detection primer for ESR1
ttttagggggattttgagtt

SEQ ID NO: 1088 - DNA, 25 bp, Artificial Sequence
  Detection primer for ESR1
aactatactctttttccaaataacc

SEQ ID NO: 1089 - DNA, 21 bp, Artificial Sequence
  Detection primer for MLH1
ttttaggagtgaaggaggtta

SEQ ID NO: 1090 - DNA, 22 bp, Artificial Sequence
  Detection primer for MLH1
atatccaaccaataaaaacaaa

SEQ ID NO: 1091 - DNA, 21 bp, Artificial Sequence
  Detection primer for TIMP3
tttgttttaggagaggggtag

SEQ ID NO: 1092 - DNA, 22 bp, Artificial Sequence
  Detection primer for TIMP3
cttaaatccacccaaacttaac

SEQ ID NO: 1093 - DNA, 22 bp, Artificial Sequence
  Detection primer for CDKN1A
agttagaaagggggtttatttt

SEQ ID NO: 1094 - DNA, 22 bp, Artificial Sequence
  Detection primer for CDKN1A
tctctcacctcctctaaatacc

SEQ ID NO: 1095 - DNA, 23 bp, Artificial Sequence
  Detection primer for TP53
ttagttttgagtatatgggaggg

SEQ ID NO: 1096 - DNA, 22 bp, Artificial Sequence
  Detection primer for TP53
aataatttccaccaattctacc

SEQ ID NO: 1097 - DNA, 19 bp, Artificial Sequence
  Detection primer for GSTP1
atttgggaaagagggaaag

SEQ ID NO: 1098 - DNA, 21 bp, Artificial Sequence
  Detection primer for GSTP1
taaaaactctaaaccccatcc

SEQ ID NO: 1099 - DNA, 22 bp, Artificial Sequence
  Detection primer for PGR
atgattgagttgaaggtaaagg

SEQ ID NO: 1100 - DNA, 21 bp, Artificial Sequence
  Detection primer for PGR
tccaaaacactatccaacaat

SEQ ID NO: 1101 - DNA, 22 bp, Artificial Sequence
  Detection primer for RARB
gggagtttttaagttttgtgag

SEQ ID NO: 1102 - DNA, 22 bp, Artificial Sequence
  Detection primer for RARB
aatcatttaccattttccaaac

SEQ ID NO: 1103 - DNA, 19 bp, Artificial Sequence
  Detection primer for CASP8
acccccttccctactaaac

SEQ ID NO: 1104 - DNA, 23 bp, Artificial Sequence
  Detection primer for CASP8
ttagggttaaatgaaaaagaaaa

SEQ ID NO: 1105 - DNA, 21 bp, Artificial Sequence
  Detection primer for SNCG
accctttaaccaccacactat

SEQ ID NO: 1106 - DNA, 22 bp, Artificial Sequence
  Detection primer for SNCG
ttgggttgagttagtaggagtt

SEQ ID NO: 1107 - DNA, 22 bp, Artificial Sequence
  Detection primer for TGFBR2
ggatggttagagagttgaaatg

SEQ ID NO: 1108 - DNA, 23 bp, Artificial Sequence
  Detection primer for TGFBR2
aaaatcctacacttcctacaaca

SEQ ID NO: 1109 - DNA, 20 bp, Artificial Sequence
  Detection primer for THBS1
agaggatggttttggagttt

SEQ ID NO: 1110 - DNA, 21 bp, Artificial Sequence
  Detection primer for THBS1
cccccttcactttctaactaa

SEQ ID NO: 1111 - DNA, 21 bp, Artificial Sequence
  Detection primer for CDH1
gttttaagggtttatggttgg

SEQ ID NO: 1112 - DNA, 20 bp, Artificial Sequence
  Detection primer for CDH1
ccctttctaatcccaaatct

SEQ ID NO: 1113 - DNA, 21 bp, Artificial Sequence
  Detection primer for DAPK1
ggtgggtatgtgtgtagagaa

SEQ ID NO: 1114 - DNA, 21 bp, Artificial Sequence
  Detection primer for DAPK1
aaacccaaaacacttcaactc

SEQ ID NO: 1115 - DNA, 19 bp, Artificial Sequence
  Detection primer for TP73
agaggggatagtaggagga

SEQ ID NO: 1116 - DNA, 23 bp, Artificial Sequence
  Detection primer for TP73
actacaaataaaaaacccaaaac

SEQ ID NO: 1117 - DNA, 20 bp, Artificial Sequence
  Detection primer for SFN
tttttgatgaggtggttgtt

SEQ ID NO: 1118 - DNA, 23 bp, Artificial Sequence
  Detection primer for SFN
aaacaaatcttaaaccctaatcc

SEQ ID NO: 1119 - DNA, 22 bp, Artificial Sequence
  Detection primer for HIC1
tttttaaaagggggttttaggt

SEQ ID NO: 1120 - DNA, 25 bp, Artificial Sequence
  Detection primer for HIC1
tacccttccaaaaactaaaaaaaac

SEQ ID NO: 1121 - DNA, 22 bp, Artificial Sequence
  Detection primer for RASSF1A
agtgggtaggttaagtgtgttg

SEQ ID NO: 1122 - DNA, 19 bp, Artificial Sequence
  Detection primer for RASSF1A
ccccaaaatccaaactaaa

SEQ ID NO: 1123 - DNA, 22 bp, Artificial Sequence
  Detection primer for BRCA1
ttggaagagtagaggttagagg

SEQ ID NO: 1124 - DNA, 22 bp, Artificial Sequence
  Detection primer for BRCA1
taccccaaaacatcacttaaac

SEQ ID NO: 1125 - DNA, 21 bp, Artificial Sequence
  Detection primer for APAF1
ttggggtgtgtttatttgtat

SEQ ID NO: 1126 - DNA, 21 bp, Artificial Sequence
  Detection primer for APAF1
ctcccctaaatctctacaacc

SEQ ID NO: 1127 - DNA, 22 bp, Artificial Sequence
  Detection primer for TMS1/ASC
ggattaagggtgtagtaaggaa

SEQ ID NO: 1128 - DNA, 23 bp, Artificial Sequence
  Detection primer for TMS1/ASC
tctccaaataaaaactaaccaac

SEQ ID NO: 1129 - DNA, 22 bp, Artificial Sequence
  Detection primer for HOXA5
ggggaaataaagttgttgtaaa

SEQ ID NO: 1130 - DNA, 26 bp, Artificial Sequence
  Detection primer for HOXA5
aatcctacctaataacctctaaaaat

SEQ ID NO: 1131 - DNA, 24 bp, Artificial Sequence
  Detection primer for SASH1
ttttgtagtgggtttaattgtttt

SEQ ID NO: 1132 - DNA, 23 bp, Artificial Sequence
  Detection primer for SASH1
ataacttaccaaaatacccatca

SEQ ID NO: 1133 - DNA, 22 bp, Artificial Sequence
  Detection primer for BRCA2
ggttggtagagataaaagggta

SEQ ID NO: 1134 - DNA, 18 bp, Artificial Sequence
  Detection primer for BRCA2
acccacccaaacctaact

SEQ ID NO: 1135 - DNA, 22 bp, Artificial Sequence
  Detection primer for NME1
ggaaaaagttgataaattggaa

SEQ ID NO: 1136 - DNA, 22 bp, Artificial Sequence
  Detection primer for NME1
cacccaaactaaaataccctaa

SEQ ID NO: 1137 - DNA, 22 bp, Artificial Sequence
  Detection primer for TPM1
gggaaagggtaggtagaaaata

SEQ ID NO: 1138 - DNA, 20 bp, Artificial Sequence
  Detection primer for TPM1
acacccaaccattaaaatcc

SEQ ID NO: 1139 - DNA, 21 bp, Artificial Sequence
  Detection primer for SOD2
ggagaaaggaggttgtaggtt

SEQ ID NO: 1140 - DNA, 22 bp, Artificial Sequence
  Detection primer for SOD2
cctatcctaaaataaatcccaa

SEQ ID NO: 1141 - DNA, 22 bp, Artificial Sequence
  Detection primer for THRB
gggtattggtaatttggttaga

SEQ ID NO: 1142 - DNA, 22 bp, Artificial Sequence
  Detection primer for THRB
cacacaacttcctcatcataaa

SEQ ID NO: 1143 - DNA, 21 bp, Artificial Sequence
  Detection primer for TWIST
gtggggatgaaatggttatag

SEQ ID NO: 1144 - DNA, 20 bp, Artificial Sequence
  Detection primer for TWIST
aaccccttaaaattccaaaa

SEQ ID NO: 1145 - DNA, 21 bp, Artificial Sequence
  Detection primer for IL6
aaggtgggtatggattttaga

SEQ ID NO: 1146 - DNA, 23 bp, Artificial Sequence
  Detection primer for IL6
caaaaacaaactcccaactatac

SEQ ID NO: 1147 - DNA, 24 bp, Artificial Sequence
  Detection primer for RARA
ataaatataggtagagggggtttt

SEQ ID NO: 1148 - DNA, 22 bp, Artificial Sequence
  Detection primer for RARA
catatacatttccatccttcct

SEQ ID NO: 1149 - DNA, 22 bp, Artificial Sequence
  Detection primer for CDH13
ggaaaagtggaattagttggta

SEQ ID NO: 1150 - DNA, 22 bp, Artificial Sequence
  Detection primer for CDH13
tcttccctacctaaaacaaaaa

SEQ ID NO: 1151 - DNA, 22 bp, Artificial Sequence
  Detection primer for CLDN7
ttgagtgtaaagggtttaggtt

SEQ ID NO: 1152 - DNA, 20 bp, Artificial Sequence
  Detection primer for CLDN7
tcctttcttcccaacaaata

SEQ ID NO: 1153 - DNA, 23 bp, Artificial Sequence
  Detection primer for ESR2
agttggagaaattgaaaagatta

SEQ ID NO: 1154 - DNA, 22 bp, Artificial Sequence
  Detection primer for ESR2
taacaaacccaaaacctctcta

SEQ ID NO: 1155 - DNA, 23 bp, Artificial Sequence
  Detection primer for IGFBP7
gggagaaggttattatttaggtt

SEQ ID NO: 1156 - DNA, 20 bp, Artificial Sequence
  Detection primer for IGFBP7
cctctctctacatccccaaa

SEQ ID NO: 1157 - DNA, 22 bp, Artificial Sequence
  Detection primer for FHIT
gggaggtaagtttaagtggaat

SEQ ID NO: 1158 - DNA, 18 bp, Artificial Sequence
  Detection primer for FHIT
actacacccccaaaacca

SEQ ID NO: 1159 - DNA, 25 bp, Artificial Sequence
  Detection primer for SERPINB5
tttttgtttaatgggtagttatttt

SEQ ID NO: 1160 - DNA, 21 bp, Artificial Sequence
  Detection primer for SERPINB5
ctcctctcctactcaaacctc

SEQ ID NO: 1161 - DNA, 22 bp, Artificial Sequence
  Detection primer for LOT1
agaggaaagagagtagttggtg

SEQ ID NO: 1162 - DNA, 22 bp, Artificial Sequence
  Detection primer for LOT1
tataaaattctcccaaccaaaa

SEQ ID NO: 1163 - DNA, 22 bp, Artificial Sequence
  Detection primer for PLAU
gtgatatttggggattgttatt

SEQ ID NO: 1164 - DNA, 20 bp, Artificial Sequence
  Detection primer for PLAU
actccctcccctatcttaca

SEQ ID NO: 1165 - DNA, 22 bp, Artificial Sequence
  Detection primer for PRSS8
ggtttgtagttttgaaaggatt

SEQ ID NO: 1166 - DNA, 21 bp, Artificial Sequence
  Detection primer for PRSS8
aatacattatccccaccctac

SEQ ID NO: 1167 - DNA, 23 bp, Artificial Sequence
  Detection primer for S100A7
agtttgagatttggtttattttg

SEQ ID NO: 1168 - DNA, 22 bp, Artificial Sequence
  Detection primer for S100A7
tatcctacccccataactatca

SEQ ID NO: 1169 - DNA, 19 bp, Artificial Sequence
  Detection primer for SLC19A1
taggggaaagtgattttga

SEQ ID NO: 1170 - DNA, 23 bp, Artificial Sequence
  Detection primer for SLC19A1
ttttccttttaacaccctaaaac

SEQ ID NO: 1171 - DNA, 22 bp, Artificial Sequence
  Detection primer for SYK
gtgggttttgggtagttataga

SEQ ID NO: 1172 - DNA, 20 bp, Artificial Sequence
  Detection primer for SYK
taacctcctctccttaccaa

SEQ ID NO: 1173 - DNA, 22 bp, Artificial Sequence
  Detection primer for TERT
taggttttggatgttagggatt

SEQ ID NO: 1174 - DNA, 20 bp, Artificial Sequence
  Detection primer for TERT
accacctcctcacctaaact

SEQ ID NO: 1175 - DNA, 20 bp, Artificial Sequence
  Detection primer for GJB2
attttgaggggagaaagaag

SEQ ID NO: 1176 - DNA, 20 bp, Artificial Sequence
  Detection primer for GJB2
cccataaattccccaaatac

SEQ ID NO: 1177 - DNA, 22 bp, Artificial Sequence
  Detection primer for FABP3
taggaaagggagaaggttttat

SEQ ID NO: 1178 - DNA, 21 bp, Artificial Sequence
  Detection primer for FABP3
ctattccccaatcttaaccaa

SEQ ID NO: 1179 - DNA, 23 bp, Artificial Sequence
  Detection primer for GPC3
aattattgtagaggggttgtagg

SEQ ID NO: 1180 - DNA, 22 bp, Artificial Sequence
  Detection primer for GPC3
tcaaatctaacaaaccacaaaa

SEQ ID NO: 1181 - DNA, 26 bp, Artificial Sequence
  Detection primer for ARH1/NOEY2
tggtagaagagtagtattagtggttt

SEQ ID NO: 1182 - DNA, 19 bp, Artificial Sequence
  Detection primer for ARH1/NOEY2
ccaatcccttttccaaata

SEQ ID NO: 1183 - DNA, 25 bp, Artificial Sequence
  Detection primer for SLIT2
aggtataagatagaagaggggattt

SEQ ID NO: 1184 - DNA, 21 bp, Artificial Sequence
  Detection primer for SLIT2
aaattacccaaacatccttca

SEQ ID NO: 1185 - DNA, 22 bp, Artificial Sequence
  Detection primer for HS3ST2
tataatgagggtttggggtaat

SEQ ID NO: 1186 - DNA, 21 bp, Artificial Sequence
  Detection primer for HS3ST2
caaaaacttctccaaaaatcc

SEQ ID NO: 1187 - DNA, 22 bp, Artificial Sequence
  Detection primer for STAT1
tgttttggtagtgaagaggatt

SEQ ID NO: 1188 - DNA, 22 bp, Artificial Sequence
  Detection primer for STAT1
aacattaaacccttccatcttt

SEQ ID NO: 1189 - DNA, 23 bp, Artificial Sequence
  Detection primer for PRDM2
agaattaaaaagattgaaggagg

SEQ ID NO: 1190 - DNA, 22 bp, Artificial Sequence
  Detection primer for PRDM2
ccaactcatctccaacctatac

SEQ ID NO: 1191 - DNA, 23 bp, Artificial Sequence
  Detection primer for MCT1
aattttagggagttaggatggta

SEQ ID NO: 1192 - DNA, 22 bp, Artificial Sequence
  Detection primer for MCT1
ctctatcacttcttccctctca

SEQ ID NO: 1193 - DNA, 22 bp, Artificial Sequence
  Detection primer for IGSF4
ggagtggagagtaagaaggtag

SEQ ID NO: 1194 - DNA, 22 bp, Artificial Sequence
  Detection primer for IGSF4
taatccccaacttccttaaaaa

SEQ ID NO: 1195 - DNA, 22 bp, Artificial Sequence
  Detection primer for SCGB3A1
tttagtgtttaatgtttggggt

SEQ ID NO: 1196 - DNA, 21 bp, Artificial Sequence
  Detection primer for SCGB3A1
caattcctaactccctaatcc

SEQ ID NO: 1197 - DNA, 22 bp, Artificial Sequence
  Detection primer for AR
aatatagggaggtttagggttt

SEQ ID NO: 1198 - DNA, 22 bp, Artificial Sequence
  Detection primer for AR
taaccatacatttctcatccaa

SEQ ID NO: 1199 - DNA, 21 bp, Artificial Sequence
  Detection primer for EYA4
ggaagaggtgattaaatggat

SEQ ID NO: 1200 - DNA, 19 bp, Artificial Sequence
  Detection primer for EYA4
cccaaaaatcaaacaacaa

SEQ ID NO: 1201 - DNA, 22 bp, Artificial Sequence
  Detection primer for LEF1
tacaaatatcaacctctctccc

SEQ ID NO: 1202 - DNA, 22 bp, Artificial Sequence
  Detection primer for LEF1
atagaatggttagggggtattt

SEQ ID NO: 1203 - DNA, 19 bp, Artificial Sequence
  Detection primer for ALX4
ctcctccttccaacaaaaa

SEQ ID NO: 1204 - DNA, 22 bp, Artificial Sequence
  Detection primer for ALX4
gtttagaggttttgggatgatt

SEQ ID NO: 1205 - DNA, 23 bp, Artificial Sequence
  Detection primer for SEQ ID NO:2
tccaataaacacaaacctaaatc

SEQ ID NO: 1206 - DNA, 22 bp, Artificial Sequence
  Detection primer for SEQ ID NO:2
atatgggattgatggaagatag

SEQ ID NO: 1207 - DNA, 18 bp, Artificial Sequence
  Detection primer for CCND2
ggaggaaggaggtgaaga

SEQ ID NO: 1208 - DNA, 22 bp, Artificial Sequence
  Detection primer for CCND2
cccctacatctactaacaaacc

SEQ ID NO: 1209 - DNA, 20 bp, Artificial Sequence
  Detection primer for CDKN2A
ggggttggttggttattaga

SEQ ID NO: 1210 - DNA, 20 bp, Artificial Sequence
  Detection primer for CDKN2A
aaccctctacccacctaaat

SEQ ID NO: 1211 - DNA, 16 bp, Artificial Sequence
  Detection oligonucleotide for PROSTAGLANDIN E2 RECEPTOR, EP4 SUBTYPE (PROSTANOID EP4 RECEPTOR) (PGE RECEPTOR, EP4 SUBTYPE)
ttcgtttacggtagtt

SEQ ID NO: 1212 - DNA, 19 bp, Artificial Sequence
  Detection oligonucleotide for PROSTAGLANDIN E2 RECEPTOR, EP4 SUBTYPE (PROSTANOID EP4 RECEPTOR) (PGE RECEPTOR, EP4 SUBTYPE)
atttttgtttatggtagtt

SEQ ID NO: 1213 - DNA, 16 bp, Artificial Sequence
  Detection oligonucleotide for KOX7
taattaggcgcgaggt

SEQ ID NO: 1214 - DNA, 16 bp, Artificial Sequence
  Detection oligonucleotide for KOX7
ttaggtgtgaggtaga

SEQ ID NO: 1215 - DNA, 16 bp, Artificial Sequence
  Detection oligonucleotide for KOX7
ttaaagtcgtgggcgg

SEQ ID NO: 1216 - DNA, 16 bp, Artificial Sequence
  Detection oligonucleotide for KOX7
ttaaagttgtgggtgg

SEQ ID NO: 1217 - DNA, 17 bp, Artificial Sequence
  Detection oligonucleotide for KOX7
ggtcgggttataacgta

SEQ ID NO: 1218 - DNA, 17 bp, Artificial Sequence
  Detection oligonucleotide for KOX7
gggttgggttataatgt

SEQ ID NO: 1219 - DNA, 16 bp, Artificial Sequence
  Detection oligonucleotide for KOX7
taaacgtttttcggga

SEQ ID NO: 1220 - DNA, 17 bp, Artificial Sequence
  Detection oligonucleotide for KOX7
ggtaaatgttttttggg

SEQ ID NO: 1221 - DNA, 16 bp, Artificial Sequence
  Detection oligonucleotide for BCL11B
ttcgggacgaaaataa

SEQ ID NO: 1222 - DNA, 17 bp, Artificial Sequence
  Detection oligonucleotide for BCL11B
aagatttttgggatgaa

SEQ ID NO: 1223 - DNA, 16 bp, Artificial Sequence
  Detection oligonucleotide for BCL11B
gttttcgtttacggat

SEQ ID NO: 1224 - DNA, 18 bp, Artificial Sequence
  Detection oligonucleotide for BCL11B
tgtttttgtttatggatt

SEQ ID NO: 1225 - DNA, 16 bp, Artificial Sequence
  Detection oligonucleotide for SEQ ID NO:51
taaatttcggacgagt

SEQ ID NO: 1226 - DNA, 19 bp, Artificial Sequence
  Detection oligonucleotide for SEQ ID NO:51
tttaaattttggatgagtt

SEQ ID NO: 1227 - DNA, 16 bp, Artificial Sequence
  Detection oligonucleotide for SEQ ID NO:51
tttacggagtttcggt

SEQ ID NO: 1228 - DNA, 17 bp, Artificial Sequence
  Detection oligonucleotide for SEQ ID NO:51
ttttatggagttttggt

SEQ ID NO: 1229 - DNA, 17 bp, Artificial Sequence
  Detection oligonucleotide for SEQ ID NO:51
tagacgttagagaacgt

SEQ ID NO: 1230 - DNA, 18 bp, Artificial Sequence
  Detection oligonucleotide for SEQ ID NO:51
agatgttagagaatgttt

SEQ ID NO: 1231 - DNA, 16 bp, Artificial Sequence
  Detection oligonucleotide for MGC34831
ttcgtttttcgggata

SEQ ID NO: 1232 - DNA, 18 bp, Artificial Sequence
  Detection oligonucleotide for MGC34831
tttgttttttgggatatg

SEQ ID NO: 1233 - DNA, 16 bp, Artificial Sequence
  Detection oligonucleotide for COL5A1
agggatagcgtttttt

SEQ ID NO: 1234 - DNA, 17 bp, Artificial Sequence
  Detection oligonucleotide for COL5A1
agggatagtgttttttg

SEQ ID NO: 1235 - DNA, 16 bp, Artificial Sequence
  Detection oligonucleotide for COL5A1
taagtgttcgggggta

SEQ ID NO: 1236 - DNA, 16 bp, Artificial Sequence
  Detection oligonucleotide for COL5A1
taagtgtttgggggta

SEQ ID NO: 1237 - DNA, 16 bp, Artificial Sequence
  Detection oligonucleotide for COL5A1
tacgaggcgggtaaat

SEQ ID NO: 1238 - DNA, 16 bp, Artificial Sequence
  Detection oligonucleotide for COL5A1
gtttatgaggtgggta

SEQ ID NO: 1239 - DNA, 17 bp, Artificial Sequence
  Detection oligonucleotide for COL5A1
tataggcgtttagtttg

SEQ ID NO: 1240 - DNA, 19 bp, Artificial Sequence
  Detection oligonucleotide for COL5A1
attataggtgtttagtttg

SEQ ID NO: 1241 - DNA, 16 bp, Artificial Sequence
  Detection oligonucleotide for COL5A1
ttaaatcgggtagggt

SEQ ID NO: 1242 - DNA, 17 bp, Artificial Sequence
  Detection oligonucleotide for COL5A1
tttaaattgggtagggt

SEQ ID NO: 1243 - DNA, 16 bp, Artificial Sequence
  Detection oligonucleotide for SEQ ID NO:54
tgttatcgcgtaggtt

SEQ ID NO: 1244 - DNA, 17 bp, Artificial Sequence
  Detection oligonucleotide for SEQ ID NO:54
gtgttattgtgtaggtt

SEQ ID NO: 1245 - DNA, 16 bp, Artificial Sequence
  Detection oligonucleotide for SEQ ID NO:54
agcgatgtattcgttt

SEQ ID NO: 1246 - DNA, 17 bp, Artificial Sequence
  Detection oligonucleotide for SEQ ID NO:54
gagagtgatgtatttgt

SEQ ID NO: 1247 - DNA, 16 bp, Artificial Sequence
  Detection oligonucleotide for SEQ ID NO:54
gacggggcgagttagt

SEQ ID NO: 1248 - DNA, 16 bp, Artificial Sequence
  Detection oligonucleotide for SEQ ID NO:54
gatggggtgagttagt

SEQ ID NO: 1249 - DNA, 16 bp, Artificial Sequence
  Detection oligonucleotide for PDLIM1
gattcgcggggataga

SEQ ID NO: 1250 - DNA, 16 bp, Artificial Sequence
  Detection oligonucleotide for PDLIM1
gatttgtggggataga

SEQ ID NO: 1251 - DNA, 16 bp, Artificial Sequence
  Detection oligonucleotide for PDLIM1
taatcgcgagggttag

SEQ ID NO: 1252 - DNA, 16 bp, Artificial Sequence
  Detection oligonucleotide for PDLIM1
ggtaattgtgagggtt

SEQ ID NO: 1253 - DNA, 16 bp, Artificial Sequence
  Detection oligonucleotide for PDLIM1
gagtttcgtcgagaga

SEQ ID NO: 1254 - DNA, 17 bp, Artificial Sequence
  Detection oligonucleotide for PDLIM1
ggagttttgttgagaga

SEQ ID NO: 1255 - DNA, 16 bp, Artificial Sequence
  Detection oligonucleotide for PDLIM1
agagcgcgagttagat

SEQ ID NO: 1256 - DNA, 17 bp, Artificial Sequence
  Detection oligonucleotide for PDLIM1
agagagtgtgagttaga

SEQ ID NO: 1257 - DNA, 16 bp, Artificial Sequence
  Detection oligonucleotide for MSF
ttcgtacgtaggtttt

SEQ ID NO: 1258 - DNA, 18 bp, Artificial Sequence
  Detection oligonucleotide for MSF
tttgtttgtatgtaggtt

SEQ ID NO: 1259 - DNA, 16 bp, Artificial Sequence
  Detection oligonucleotide for MSF
taggaaagcgtacgta

SEQ ID NO: 1260 - DNA, 18 bp, Artificial Sequence
  Detection oligonucleotide for MSF
aggaaagtgtatgtattt

SEQ ID NO: 1261 - DNA, 17 bp, Artificial Sequence
  Detection oligonucleotide for SEQ ID NO:14
aaatacgtattttcggt

SEQ ID NO: 1262 - DNA, 19 bp, Artificial Sequence
  Detection oligonucleotide for SEQ ID NO:14
atatgtatttttggtagtt

SEQ ID NO: 1263 - DNA, 16 bp, Artificial Sequence
  Detection oligonucleotide for SEQ ID NO:16
aagtagatcgggacga

SEQ ID NO: 1264 - DNA, 16 bp, Artificial Sequence
  Detection oligonucleotide for SEQ ID NO:16
tagattgggatgagga

SEQ ID NO: 1265 - DNA, 16 bp, Artificial Sequence
  Detection oligonucleotide for SEQ ID NO:17
ggtgatttcgacggtt

SEQ ID NO: 1266 - DNA, 17 bp, Artificial Sequence
  Detection oligonucleotide for SEQ ID NO:17
aggtgattttgatggtt

SEQ ID NO: 1267 - DNA, 16 bp, Artificial Sequence
  Detection oligonucleotide for SEQ ID NO:17
agtagcgtaatttcga

SEQ ID NO: 1268 - DNA, 17 bp, Artificial Sequence
  Detection oligonucleotide for SEQ ID NO:17
agtgtaattttgaggtg

SEQ ID NO: 1269 - DNA, 16 bp, Artificial Sequence
  Detection oligonucleotide for SEQ ID NO:17
tatggcgcgtatgtat

SEQ ID NO: 1270 - DNA, 17 bp, Artificial Sequence
  Detection oligonucleotide for SEQ ID NO:17
gattatggtgtgtatgt

SEQ ID NO: 1271 - DNA, 17 bp, Artificial Sequence
  Detection oligonucleotide for RAP2B
agatgtttcgatttgtt

SEQ ID NO: 1272 - DNA, 18 bp, Artificial Sequence
  Detection oligonucleotide for RAP2B
gagatgttttgatttgtt

SEQ ID NO: 1273 - DNA, 17 bp, Artificial Sequence
  Detection oligonucleotide for RAP2B
gggtaatcgttagattt

SEQ ID NO: 1274 - DNA, 18 bp, Artificial Sequence
  Detection oligonucleotide for RAP2B
ggtaattgttagatttgg

SEQ ID NO: 1275 - DNA, 17 bp, Artificial Sequence
  Detection oligonucleotide for PCDH7
aaagtgtagcgttattt

SEQ ID NO: 1276 - DNA, 19 bp, Artificial Sequence
  Detection oligonucleotide for PCDH7
aaagtgtagtgttatttat

SEQ ID NO: 1277 - DNA, 19 bp, Artificial Sequence
  Detection oligonucleotide for PCDH7
ttggaaatttcgatattat

SEQ ID NO: 1278 - DNA, 20 bp, Artificial Sequence
  Detection oligonucleotide for PCDH7
tggaaattttgatattattt

SEQ ID NO: 1279 - DNA, 16 bp, Artificial Sequence
  Detection oligonucleotide for DKK3
tttcggaacgcgatta

SEQ ID NO: 1280 - DNA, 16 bp, Artificial Sequence
  Detection oligonucleotide for DKK3
gtgttttggaatgtga

SEQ ID NO: 1281 - DNA, 16 bp, Artificial Sequence
  Detection oligonucleotide for RTTN
aatggtcgtgttacgt

SEQ ID NO: 1282 - DNA, 17 bp, Artificial Sequence
  Detection oligonucleotide for RTTN
atggttgtgttatgttt

SEQ ID NO: 1283 - DNA, 17 bp, Artificial Sequence
  Detection oligonucleotide for RTTN
ttgcggaatttatcgtt

SEQ ID NO: 1284 - DNA, 18 bp, Artificial Sequence
  Detection oligonucleotide for RTTN
tgtggaatttattgtttt

SEQ ID NO: 1285 - DNA, 16 bp, Artificial Sequence
  Detection oligonucleotide for GIRK2
ttgaaattcgtacggg

SEQ ID NO: 1286 - DNA, 16 bp, Artificial Sequence
  Detection oligonucleotide for GIRK2
aaatttgtatgggggg

SEQ ID NO: 1287 - DNA, 16 bp, Artificial Sequence
  Detection oligonucleotide for SEQ ID NO:28
gagtaacgcgtgtgat

SEQ ID NO: 1288 - DNA, 17 bp, Artificial Sequence
  Detection oligonucleotide for SEQ ID NO:28
tatgagtaatgtgtgtg

SEQ ID NO: 1289 - DNA, 18 bp, Artificial Sequence
  Detection oligonucleotide for SEQ ID NO:28
ttttcggtaagtttacgg

SEQ ID NO: 1290 - DNA, 18 bp, Artificial Sequence
  Detection oligonucleotide for SEQ ID NO:28
tttttggtaagtttatgg

SEQ ID NO: 1291 - DNA, 16 bp, Artificial Sequence
  Detection oligonucleotide for SEQ ID NO:28
ataagacggagttcgt

SEQ ID NO: 1292 - DNA, 17 bp, Artificial Sequence
  Detection oligonucleotide for SEQ ID NO:28
aagatggagtttgtttg

SEQ ID NO: 1293 - DNA, 16 bp, Artificial Sequence
  Detection oligonucleotide for SEQ ID NO:28
attcggtgaagcgatt

SEQ ID NO: 1294 - DNA, 17 bp, Artificial Sequence
  Detection oligonucleotide for SEQ ID NO:28
atttggtgaagtgattt

SEQ ID NO: 1295 - DNA, 16 bp, Artificial Sequence
  Detection oligonucleotide for SEQ ID NO:28
gttcgtagcggtaggt

SEQ ID NO: 1296 - DNA, 17 bp, Artificial Sequence
  Detection oligonucleotide for SEQ ID NO:28
tttgtagtggtaggtga

SEQ ID NO: 1297 - DNA, 16 bp, Artificial Sequence
  Detection oligonucleotide for SEQ ID NO:28
tggacggagacgaaag

SEQ ID NO: 1298 - DNA, 17 bp, Artificial Sequence
  Detection oligonucleotide for SEQ ID NO:28
ggatggagatgaaagga

SEQ ID NO: 1299 - DNA, 16 bp, Artificial Sequence
  Detection oligonucleotide for THH
agtacgtgtatatcgg

SEQ ID NO: 1300 - DNA, 19 bp, Artificial Sequence
  Detection oligonucleotide for THH
tagtatgtgtatattggaa

SEQ ID NO: 1301 - DNA, 16 bp, Artificial Sequence
  Detection oligonucleotide for SEQ ID NO:36
ttgtcgtgatagcgtt

SEQ ID NO: 1302 - DNA, 17 bp, Artificial Sequence
  Detection oligonucleotide for SEQ ID NO:36
tttgttgtgatagtgtt

SEQ ID NO: 1303 - DNA, 16 bp, Artificial Sequence
  Detection oligonucleotide for GS1
gaagcgacgtttattt

SEQ ID NO: 1304 - DNA, 17 bp, Artificial Sequence
  Detection oligonucleotide for GS1
gggaagtgatgtttatt

SEQ ID NO: 1305 - DNA, 16 bp, Artificial Sequence
  Detection oligonucleotide for GS1
aatcgttagttcggtt

SEQ ID NO: 1306 - DNA, 17 bp, Artificial Sequence
  Detection oligonucleotide for GS1
tgaattgttagtttggt

SEQ ID NO: 1307 - DNA, 16 bp, Artificial Sequence
  Detection oligonucleotide for GS1
tagaggttcgagcgta

SEQ ID NO: 1308 - DNA, 16 bp, Artificial Sequence
  Detection oligonucleotide for GS1
agaggtttgagtgtag

SEQ ID NO: 1309 - DNA, 16 bp, Artificial Sequence
  Detection oligonucleotide for TITF1
tttttgcgtaaacgta

SEQ ID NO: 1310 - DNA, 17 bp, Artificial Sequence
  Detection oligonucleotide for TITF1
ttgtgtaaatgtagggt

SEQ ID NO: 1311 - DNA, 18 bp, Artificial Sequence
  Detection oligonucleotide for SEQ ID NO:42
ttcggaagtttaacgagg

SEQ ID NO: 1312 - DNA, 18 bp, Artificial Sequence
  Detection oligonucleotide for SEQ ID NO:42
tttggaagtttaatgagg

SEQ ID NO: 1313 - DNA, 17 bp, Artificial Sequence
  Detection oligonucleotide for DDX51
tgcgtttatcgttttag

SEQ ID NO: 1314 - DNA, 18 bp, Artificial Sequence
  Detection oligonucleotide for DDX51
tgtgtttattgttttagg

SEQ ID NO: 1315 - DNA, 16 bp, Artificial Sequence
  Detection oligonucleotide for Q8NAN2
agtttcgcgaggggtt

SEQ ID NO: 1316 - DNA, 16 bp, Artificial Sequence
  Detection oligonucleotide for Q8NAN2
agagttttgtgagggg

SEQ ID NO: 1317 - DNA, 17 bp, Artificial Sequence
  Detection oligonucleotide for Q8NAN2
tttttacgttagaggga

SEQ ID NO: 1318 - DNA, 18 bp, Artificial Sequence
  Detection oligonucleotide for Q8NAN2
tttttatgttagagggag

SEQ ID NO: 1319 - DNA, 16 bp, Artificial Sequence
  Detection oligonucleotide for SEQ ID NO:45
taatgtcgatcggatt

SEQ ID NO: 1320 - DNA, 17 bp, Artificial Sequence
  Detection oligonucleotide for SEQ ID NO:45
atgttgattggatttgt

SEQ ID NO: 1321 - DNA, 16 bp, Artificial Sequence
  Detection oligonucleotide for SEQ ID NO:45
ttttttacgggcgata

SEQ ID NO: 1322 - DNA, 17 bp, Artificial Sequence
  Detection oligonucleotide for SEQ ID NO:45
ttttatgggtgataggt

SEQ ID NO: 1323 - DNA, 16 bp, Artificial Sequence
  Detection oligonucleotide for SEQ ID NO:9
aggtatttcgcgatat

SEQ ID NO: 1324 - DNA, 19 bp, Artificial Sequence
  Detection oligonucleotide for SEQ ID NO:9
aggtattttgtgatatttt

SEQ ID NO: 1325 - DNA, 17 bp, Artificial Sequence
  Detection oligonucleotide for SEQ ID NO:9
gtttttcgatttacgtt

SEQ ID NO: 1326 - DNA, 19 bp, Artificial Sequence
  Detection oligonucleotide for SEQ ID NO:9
taggttttttgatttatgt

SEQ ID NO: 1327 - DNA, 16 bp, Artificial Sequence
  Detection oligonucleotide for SEQ ID NO:9
ttacggttcggttatt

SEQ ID NO: 1328 - DNA, 17 bp, Artificial Sequence
  Detection oligonucleotide for SEQ ID NO:9
aggttttatggtttggt

SEQ ID NO: 1329 - DNA, 16 bp, Artificial Sequence
  Detection oligonucleotide for ALX4
attgtttgggggaatt

SEQ ID NO: 1330 - DNA, 18 bp, Artificial Sequence
  Detection oligonucleotide for LEF1
tgagatttcgtttattga

SEQ ID NO: 1331 - DNA, 19 bp, Artificial Sequence
  Detection oligonucleotide for LEF1
attgagattttgtttattg

SEQ ID NO: 1332 - DNA, 19 bp, Artificial Sequence
  Detection oligonucleotide for LEF1
ttgtttttaacgaaattat

SEQ ID NO: 1333 - DNA, 21 bp, Artificial Sequence
  Detection oligonucleotide for LEF1
tgtttttaatgaaattattta

SEQ ID NO: 1334 - DNA, 16 bp, Artificial Sequence
  Detection oligonucleotide for LEF1
ttggaagtcgaagaga

SEQ ID NO: 1335 - DNA, 17 bp, Artificial Sequence
  Detection oligonucleotide for LEF1
tttggaagttgaagaga

SEQ ID NO: 1336 - DNA, 18 bp, Artificial Sequence
  Detection oligonucleotide for LEF1
tggatttttcgagtaatt

SEQ ID NO: 1337 - DNA, 19 bp, Artificial Sequence
  Detection oligonucleotide for LEF1
ttggattttttgagtaatt

SEQ ID NO: 1338 - DNA, 16 bp, Artificial Sequence
  Detection oligonucleotide for SCGB3A1
gatagacgagtgagga

SEQ ID NO: 1339 - DNA, 17 bp, Artificial Sequence
  Detection oligonucleotide for SCGB3A1
gatagatgagtgaggat

SEQ ID NO: 1340 - DNA, 16 bp, Artificial Sequence
  Detection oligonucleotide for SASH1
attgggacgtacggtt

SEQ ID NO: 1341 - DNA, 16 bp, Artificial Sequence
  Detection oligonucleotide for SASH1
gattgggatgtatggt

SEQ ID NO: 1342 - DNA, 18 bp, Artificial Sequence
  Detection oligonucleotide for APC
tttgtattttgtagtggg

SEQ ID NO: 1343 - DNA, 18 bp, Artificial Sequence
  Detection oligonucleotide for BRCA2
agtatacgtattattcgg

SEQ ID NO: 1344 - DNA, 20 bp, Artificial Sequence
  Detection oligonucleotide for BRCA2
agtatatgtattatttggaa

SEQ ID NO: 1345 - DNA, 16 bp, Artificial Sequence
  Detection oligonucleotide for BRCA2
tagaagttcgcgttat

SEQ ID NO: 1346 - DNA, 18 bp, Artificial Sequence
  Detection oligonucleotide for BRCA2
gaagtttgtgttataagt

SEQ ID NO: 1347 - DNA, 18 bp, Artificial Sequence
  Detection oligonucleotide for BRCA2
tatcgtcgtaaaagatat

SEQ ID NO: 1348 - DNA, 20 bp, Artificial Sequence
  Detection oligonucleotide for BRCA2
gatttattgttgtaaaagat

SEQ ID NO: 1349 - DNA, 16 bp, Artificial Sequence
  Detection oligonucleotide for BRCA2
tttcgttacgttggat

SEQ ID NO: 1350 - DNA, 18 bp, Artificial Sequence
  Detection oligonucleotide for BRCA2
tttttgttatgttggatt

SEQ ID NO: 1351 - DNA, 16 bp, Artificial Sequence
  Detection oligonucleotide for CDH1
tatagacgcggtgatt

SEQ ID NO: 1352 - DNA, 18 bp, Artificial Sequence
  Detection oligonucleotide for CDH1
tatagatgtggtgatttt

SEQ ID NO: 1353 - DNA, 16 bp, Artificial Sequence
  Detection oligonucleotide for CDH1
ttgacggttcgtttat

SEQ ID NO: 1354 - DNA, 16 bp, Artificial Sequence
  Detection oligonucleotide for CDH1
ggagttgatggtttgt

SEQ ID NO: 1355 - DNA, 16 bp, Artificial Sequence
  Detection oligonucleotide for CDH1
attagtagcgcggatt

SEQ ID NO: 1356 - DNA, 18 bp, Artificial Sequence
  Detection oligonucleotide for CDH1
aattagtagtgtggattt

SEQ ID NO: 1357 - DNA, 16 bp, Artificial Sequence
  Detection oligonucleotide for CDH1
ttcggaggtatcgttt

SEQ ID NO: 1358 - DNA, 17 bp, Artificial Sequence
  Detection oligonucleotide for CDH1
ttttggaggtattgttt

SEQ ID NO: 1359 - DNA, 16 bp, Artificial Sequence
  Detection oligonucleotide for CDKN1A
agcgtattaacgtagg

SEQ ID NO: 1360 - DNA, 19 bp, Artificial Sequence
  Detection oligonucleotide for CDKN1A
tttagtgtattaatgtagg

SEQ ID NO: 1361 - DNA, 16 bp, Artificial Sequence
  Detection oligonucleotide for CDKN1A
tgtagtacgcgaggtt

SEQ ID NO: 1362 - DNA, 17 bp, Artificial Sequence
  Detection oligonucleotide for CDKN1A
tgtagtatgtgaggttt

SEQ ID NO: 1363 - DNA, 16 bp, Artificial Sequence
  Detection oligonucleotide for CDKN1A
ttcgtcgaggtatcga

SEQ ID NO: 1364 - DNA, 17 bp, Artificial Sequence
  Detection oligonucleotide for CDKN1A
tttgttgaggtattgag

SEQ ID NO: 1365 - DNA, 16 bp, Artificial Sequence
  Detection oligonucleotide for DAPK1
atagatcgtttagcgt

SEQ ID NO: 1366 - DNA, 17 bp, Artificial Sequence
  Detection oligonucleotide for DAPK1
attgtttagtgtttggg

SEQ ID NO: 1367 - DNA, 16 bp, Artificial Sequence
  Detection oligonucleotide for DAPK1
ttttatttcgcgagga

SEQ ID NO: 1368 - DNA, 16 bp, Artificial Sequence
  Detection oligonucleotide for DAPK1
tattttgtgaggaggg

SEQ ID NO: 1369 - DNA, 16 bp, Artificial Sequence
  Detection oligonucleotide for SEQ ID NO:2
ttgaattgcggttaga

SEQ ID NO: 1370 - DNA, 17 bp, Artificial Sequence
  Detection oligonucleotide for SEQ ID NO:2
ttgaattgtggttagag

SEQ ID NO: 1371 - DNA, 16 bp, Artificial Sequence
  Detection oligonucleotide for FHIT
ttttcgttttacgagg

SEQ ID NO: 1372 - DNA, 17 bp, Artificial Sequence
  Detection oligonucleotide for FHIT
ttttgttttatgagggt

SEQ ID NO: 1373 - DNA, 16 bp, Artificial Sequence
  Detection oligonucleotide for HIC1
ttttgtcgtacggaat

SEQ ID NO: 1374 - DNA, 17 bp, Artificial Sequence
  Detection oligonucleotide for HIC1
agtttttgttgtatgga

SEQ ID NO: 1375 - DNA, 16 bp, Artificial Sequence
  Detection oligonucleotide for MLH1
aagtcgttttgacgta

SEQ ID NO: 1376 - DNA, 18 bp, Artificial Sequence
  Detection oligonucleotide for MLH1
taagttgttttgatgtag

SEQ ID NO: 1377 - DNA, 16 bp, Artificial Sequence
  Detection oligonucleotide for MLH1
tatcgtttttcggagg

SEQ ID NO: 1378 - DNA, 17 bp, Artificial Sequence
  Detection oligonucleotide for MLH1
tattgttttttggaggt

SEQ ID NO: 1379 - DNA, 16 bp, Artificial Sequence
  Detection oligonucleotide for MLH1
tagagtttcgtcgatt

SEQ ID NO: 1380 - DNA, 18 bp, Artificial Sequence
  Detection oligonucleotide for MLH1
agagttttgttgattttt

SEQ ID NO: 1381 - DNA, 20 bp, Artificial Sequence
  Detection oligonucleotide for RARB
atcgaaagtttattcgtata

SEQ ID NO: 1382 - DNA, 20 bp, Artificial Sequence
  Detection oligonucleotide for RARB
ttattgaaagtttatttgta

SEQ ID NO: 1383 - DNA, 16 bp, Artificial Sequence
  Detection oligonucleotide for SOD2
gtttcggtaatttcgt

SEQ ID NO: 1384 - DNA, 18 bp, Artificial Sequence
  Detection oligonucleotide for SOD2
ggttttggtaattttgtt

SEQ ID NO: 1385 - DNA, 16 bp, Artificial Sequence
  Detection oligonucleotide for TERT
aagacgtattgttcgt

SEQ ID NO: 1386 - DNA, 18 bp, Artificial Sequence
  Detection oligonucleotide for TERT
aagatgtattgtttgttg

SEQ ID NO: 1387 - DNA, 16 bp, Artificial Sequence
  Detection oligonucleotide for TERT
attacgcgtagtgttt

SEQ ID NO: 1388 - DNA, 17 bp, Artificial Sequence
  Detection oligonucleotide for TERT
tgggaattatgtgtagt

SEQ ID NO: 1389 - DNA, 16 bp, Artificial Sequence
  Detection oligonucleotide for TGFBR2
ttttatttcgaagcgg

SEQ ID NO: 1390 - DNA, 17 bp, Artificial Sequence
  Detection oligonucleotide for TGFBR2
tttgaagtgggtttatt

SEQ ID NO: 1391 - DNA, 18 bp, Artificial Sequence
  Detection oligonucleotide for TGFBR2
ataacgtattaggagcgg

SEQ ID NO: 1392 - DNA, 18 bp, Artificial Sequence
  Detection oligonucleotide for TGFBR2
ataatgtattaggagtgg

SEQ ID NO: 1393 - DNA, 16 bp, Artificial Sequence
  Detection oligonucleotide for THRB
gagcgtcgtaagaatt

SEQ ID NO: 1394 - DNA, 17 bp, Artificial Sequence
  Detection oligonucleotide for THRB
ggagtgttgtaagaatt

SEQ ID NO: 1395 - DNA, 16 bp, Artificial Sequence
  Detection oligonucleotide for THRB
tttaatcgtagcggtt

SEQ ID NO: 1396 - DNA, 17 bp, Artificial Sequence
  Detection oligonucleotide for THRB
aattgtagtggttttgt

SEQ ID NO: 1397 - DNA, 16 bp, Artificial Sequence
  Detection oligonucleotide for THRB
tagcgtcgaatttagt

SEQ ID NO: 1398 - DNA, 18 bp, Artificial Sequence
  Detection oligonucleotide for THRB
ttagtgttgaatttagtg

SEQ ID NO: 1399 - DNA, 16 bp, Artificial Sequence
  Detection oligonucleotide for TP53
aggattttcgtcgatt

SEQ ID NO: 1400 - DNA, 19 bp, Artificial Sequence
  Detection oligonucleotide for TP53
ttaggatttttgttgattt

SEQ ID NO: 1401 - DNA, 16 bp, Artificial Sequence
  Detection oligonucleotide for TP53
taattcgtttgtcgga

SEQ ID NO: 1402 - DNA, 17 bp, Artificial Sequence
  Detection oligonucleotide for TP53
atttgtttgttggagga

SEQ ID NO: 1403 - DNA, 17 bp, Artificial Sequence
  Detection oligonucleotide for TP53
tggatagtcgttatgat

SEQ ID NO: 1404 - DNA, 18 bp, Artificial Sequence
  Detection oligonucleotide for TP53
ttggatagttgttatgat

SEQ ID NO: 1405 - DNA, 16 bp, Artificial Sequence
  Detection oligonucleotide for TP53
aatttttgcgaggttt

SEQ ID NO: 1406 - DNA, 18 bp, Artificial Sequence
  Detection oligonucleotide for TP53
taatttttgtgaggtttt

SEQ ID NO: 1407 - DNA, 16 bp, Artificial Sequence
  Detection oligonucleotide for TP73
tttttcgcgagcgtta

SEQ ID NO: 1408 - DNA, 17 bp, Artificial Sequence
  Detection oligonucleotide for TP73
ttttgtgagtgttaagt

SEQ ID NO: 1409 - DNA, 18 bp, Artificial Sequence
  Detection oligonucleotide for TP73
gggtcgatttaatttcga

SEQ ID NO: 1410 - DNA, 18 bp, Artificial Sequence
  Detection oligonucleotide for TP73
gggttgatttaattttga

SEQ ID NO: 1411 - DNA, 16 bp, Artificial Sequence
  Detection oligonucleotide for THBS1
ttggcgcgtaattttt

SEQ ID NO: 1412 - DNA, 17 bp, Artificial Sequence
  Detection oligonucleotide for THBS1
tgtttggtgtgtaattt

SEQ ID NO: 1413 - DNA, 16 bp, Artificial Sequence
  Detection oligonucleotide for TMS1/ASC
ttcggagtcgattttt

SEQ ID NO: 1414 - DNA, 18 bp, Artificial Sequence
  Detection oligonucleotide for TMS1/ASC
gttttggagttgattttt

SEQ ID NO: 1415 - DNA, 16 bp, Artificial Sequence
  Detection oligonucleotide for TMS1/ASC
atttgatcgtcgagga

SEQ ID NO: 1416 - DNA, 16 bp, Artificial Sequence
  Detection oligonucleotide for TMS1/ASC
ttgattgttgaggagt

SEQ ID NO: 1417 - DNA, 16 bp, Artificial Sequence
  Detection oligonucleotide for TMS1/ASC
agggttacgggcgtat

SEQ ID NO: 1418 - DNA, 16 bp, Artificial Sequence
  Detection oligonucleotide for TMS1/ASC
agggttatgggtgtat

SEQ ID NO: 1419 - DNA, 16 bp, Artificial Sequence
  Detection oligonucleotide for IL6
tatgcgtatcgggttt

SEQ ID NO: 1420 - DNA, 17 bp, Artificial Sequence
  Detection oligonucleotide for IL6
atgtgtattgggttttt

SEQ ID NO: 1421 - DNA, 16 bp, Artificial Sequence
  Detection oligonucleotide for APAF1
gattcgcgaagatttg

SEQ ID NO: 1422 - DNA, 18 bp, Artificial Sequence
  Detection oligonucleotide for APAF1
gatttgtgaagatttgag

SEQ ID NO: 1423 - DNA, 16 bp, Artificial Sequence
  Detection oligonucleotide for APAF1
tggacgtttatttcgt

SEQ ID NO: 1424 - DNA, 18 bp, Artificial Sequence
  Detection oligonucleotide for APAF1
gtggatgtttattttgtt

SEQ ID NO: 1425 - DNA, 16 bp, Artificial Sequence
  Detection oligonucleotide for CASP8
aggtaacggtttagag

SEQ ID NO: 1426 - DNA, 17 bp, Artificial Sequence
  Detection oligonucleotide for CASP8
aggtaatggtttagaga

SEQ ID NO: 1427 - DNA, 17 bp, Artificial Sequence
  Detection oligonucleotide for RARA
aaagtttcgtttaaggt

SEQ ID NO: 1428 - DNA, 18 bp, Artificial Sequence
  Detection oligonucleotide for RARA
aaagttttgtttaaggtg

SEQ ID NO: 1429 - DNA, 16 bp, Artificial Sequence
  Detection oligonucleotide for RARA
tttcggcgagtaaagt

SEQ ID NO: 1430 - DNA, 17 bp, Artificial Sequence
  Detection oligonucleotide for RARA
tttttggtgagtaaagt

SEQ ID NO: 1431 - DNA, 16 bp, Artificial Sequence
  Detection oligonucleotide for AR
ttaagaggcgaaaagt

SEQ ID NO: 1432 - DNA, 17 bp, Artificial Sequence
  Detection oligonucleotide for AR
aagaggtgaaaagtagt

SEQ ID NO: 1433 - DNA, 17 bp, Artificial Sequence
  Detection oligonucleotide for AR
aatatgcgaaggtaatt

SEQ ID NO: 1434 - DNA, 19 bp, Artificial Sequence
  Detection oligonucleotide for AR
ttaaaatatgtgaaggtaa

SEQ ID NO: 1435 - DNA, 16 bp, Artificial Sequence
  Detection oligonucleotide for AR
aagtaagcggttgtat

SEQ ID NO: 1436 - DNA, 18 bp, Artificial Sequence
  Detection oligonucleotide for AR
aagtaagtggttgtatat

SEQ ID NO: 1437 - DNA, 16 bp, Artificial Sequence
  Detection oligonucleotide for AR
attgagcgtttatgtg

SEQ ID NO: 1438 - DNA, 17 bp, Artificial Sequence
  Detection oligonucleotide for AR
attgagtgtttatgtgt

SEQ ID NO: 1439 - DNA, 16 bp, Artificial Sequence
  Detection oligonucleotide for ESR2
atttcgaggattacgt

SEQ ID NO: 1440 - DNA, 19 bp, Artificial Sequence
  Detection oligonucleotide for ESR2
atattttgaggattatgtt

SEQ ID NO: 1441 - DNA, 16 bp, Artificial Sequence
  Detection oligonucleotide for STAT1
aggttaacgttcgtat

SEQ ID NO: 1442 - DNA, 19 bp, Artificial Sequence
  Detection oligonucleotide for STAT1
ttaggttaatgtttgtatt

SEQ ID NO: 1443 - DNA, 18 bp, Artificial Sequence
  Detection oligonucleotide for STAT1
taatttcgatagttttgg

SEQ ID NO: 1444 - DNA, 20 bp, Artificial Sequence
  Detection oligonucleotide for STAT1
tataattttgatagttttgg

SEQ ID NO: 1445 - DNA, 16 bp, Artificial Sequence
  Detection oligonucleotide for BRCA1
tttacgttattcgggg

SEQ ID NO: 1446 - DNA, 17 bp, Artificial Sequence
  Detection oligonucleotide for BRCA1
tatgttatttgggggta

SEQ ID NO: 1447 - DNA, 16 bp, Artificial Sequence
  Detection oligonucleotide for LOT1
gagtttcgtggttgaa

SEQ ID NO: 1448 - DNA, 16 bp, Artificial Sequence
  Detection oligonucleotide for LOT1
gagttttgtggttgaa

SEQ ID NO: 1449 - DNA, 16 bp, Artificial Sequence
  Detection oligonucleotide for PRSS8
attttgcgtggttaga

SEQ ID NO: 1450 - DNA, 17 bp, Artificial Sequence
  Detection oligonucleotide for PRSS8
gattttgtgtggttaga

SEQ ID NO: 1451 - DNA, 16 bp, Artificial Sequence
  Detection oligonucleotide for TPM1
aagagtcgttttaggt

SEQ ID NO: 1452 - DNA, 18 bp, Artificial Sequence
  Detection oligonucleotide for TPM1
taagagttgttttaggtt

SEQ ID NO: 1453 - DNA, 16 bp, Artificial Sequence
  Detection oligonucleotide for TPM1
gtcgagagcgtattga

SEQ ID NO: 1454 - DNA, 16 bp, Artificial Sequence
  Detection oligonucleotide for TPM1
ggtgttgagagtgtat

SEQ ID NO: 1455 - DNA, 16 bp, Artificial Sequence
  Detection oligonucleotide for TPM1
ggcgacgcgtatttat

SEQ ID NO: 1456 - DNA, 16 bp, Artificial Sequence
  Detection oligonucleotide for TPM1
ggggtgatgtgtattt

SEQ ID NO: 1457 - DNA, 16 bp, Artificial Sequence
  Detection oligonucleotide for GPC3
tttttcgggaatcgtt

SEQ ID NO: 1458 - DNA, 17 bp, Artificial Sequence
  Detection oligonucleotide for GPC3
agttttttgggaattgt

SEQ ID NO: 1459 - DNA, 16 bp, Artificial Sequence
  Detection oligonucleotide for GPC3
ttcgagcgcgttgatt

SEQ ID NO: 1460 - DNA, 16 bp, Artificial Sequence
  Detection oligonucleotide for GPC3
taggtttgagtgtgtt

SEQ ID NO: 1461 - DNA, 16 bp, Artificial Sequence
  Detection oligonucleotide for SLC19A1
tataagttcgtacggg

SEQ ID NO: 1462 - DNA, 18 bp, Artificial Sequence
  Detection oligonucleotide for SLC19A1
ataagtttgtatgggtta

SEQ ID NO: 1463 - DNA, 16 bp, Artificial Sequence
  Detection oligonucleotide for SLC19A1
ggttcgattcgcgttt

SEQ ID NO: 1464 - DNA, 17 bp, Artificial Sequence
  Detection oligonucleotide for SLC19A1
tgggtttgatttgtgtt

SEQ ID NO: 1465 - DNA, 16 bp, Artificial Sequence
  Detection oligonucleotide for GJB2
tttcgcgattcgaata

SEQ ID NO: 1466 - DNA, 18 bp, Artificial Sequence
  Detection oligonucleotide for GJB2
tagtttttgtgatttgaa

SEQ ID NO: 1467 - DNA, 16 bp, Artificial Sequence
  Detection oligonucleotide for GJB2
tttcgtattatgcgga

SEQ ID NO: 1468 - DNA, 18 bp, Artificial Sequence
  Detection oligonucleotide for GJB2
tttgtattatgtggagta

SEQ ID NO: 1469 - DNA, 16 bp, Artificial Sequence
  Detection oligonucleotide for IGSF4
ttagcggtagattcgg

SEQ ID NO: 1470 - DNA, 16 bp, Artificial Sequence
  Detection oligonucleotide for IGSF4
agtggtagatttgggg

SEQ ID NO: 1471 - DNA, 16 bp, Artificial Sequence
  Detection oligonucleotide for MCT1
agtcgttattcggaaa

SEQ ID NO: 1472 - DNA, 18 bp, Artificial Sequence
  Detection oligonucleotide for MCT1
tgtagttgttatttggaa

SEQ ID NO: 1473 - DNA, 18 bp, Artificial Sequence
  Detection oligonucleotide for CCND2
aacgttattagatcgtat

SEQ ID NO: 1474 - DNA, 19 bp, Artificial Sequence
  Detection oligonucleotide for CCND2
agaaatgttattagattgt

SEQ ID NO: 1475 - DNA, 16 bp, Artificial Sequence
  Detection oligonucleotide for SCGB3A1
tagtgttcgacgttgt

SEQ ID NO: 1476 - DNA, 17 bp, Artificial Sequence
  Detection oligonucleotide for SCGB3A1
tagtgtttgatgttgtt

SEQ ID NO: 1477 - DNA, 16 bp, Artificial Sequence
  Detection oligonucleotide for SASH1
tagattcgaggtgcgg

SEQ ID NO: 1478 - DNA, 16 bp, Artificial Sequence
  Detection oligonucleotide for SASH1
tagatttgaggtgtgg

SEQ ID NO: 1479 - DNA, 17 bp, Artificial Sequence
  Detection oligonucleotide for SASH1
attcggtattcgggtag

SEQ ID NO: 1480 - DNA, 17 bp, Artificial Sequence
  Detection oligonucleotide for SASH1
atttggtatttgggtag

SEQ ID NO: 1481 - DNA, 16 bp, Artificial Sequence
  Detection oligonucleotide for SASH1
agtcggaatcggagtt

SEQ ID NO: 1482 - DNA, 17 bp, Artificial Sequence
  Detection oligonucleotide for SASH1
gttggaattggagttta

SEQ ID NO: 1483 - DNA, 17 bp, Artificial Sequence
  Detection oligonucleotide for ARH1/NOEY2
tgttatcgttaacgatt

SEQ ID NO: 1484 - DNA, 18 bp, Artificial Sequence
  Detection oligonucleotide for ARH1/NOEY2
aggtgttattgttaatga

SEQ ID NO: 1485 - DNA, 16 bp, Artificial Sequence
  Detection oligonucleotide for ARH1/NOEY2
taaaacgttcggtagg

SEQ ID NO: 1486 - DNA, 18 bp, Artificial Sequence
  Detection oligonucleotide for ARH1/NOEY2
tttaaaatgtttggtagg

SEQ ID NO: 1487 - DNA, 16 bp, Artificial Sequence
  Detection oligonucleotide for ARH1/NOEY2
tgtattcgtcgttagg

SEQ ID NO: 1488 - DNA, 18 bp, Artificial Sequence
  Detection oligonucleotide for ARH1/NOEY2
aatgtatttgttgttagg

SEQ ID NO: 1489 - DNA, 16 bp, Artificial Sequence
  Detection oligonucleotide for ARH1/NOEY2
ttagacggagttcgga

SEQ ID NO: 1490 - DNA, 17 bp, Artificial Sequence
  Detection oligonucleotide for ARH1/NOEY2
tagatggagtttggaga

SEQ ID NO: 1491 - DNA, 16 bp, Artificial Sequence
  Detection oligonucleotide for ARH1/NOEY2
tagacgtaggcgtatt

SEQ ID NO: 1492 - DNA, 16 bp, Artificial Sequence
  Detection oligonucleotide for ARH1/NOEY2
gggtagatgtaggtgt

SEQ ID NO: 1493 - DNA, 16 bp, Artificial Sequence
  Detection oligonucleotide for CCND2
ttagggtcgatcgtgt

SEQ ID NO: 1494 - DNA, 16 bp, Artificial Sequence
  Detection oligonucleotide for CCND2
tagggttgattgtgtt

SEQ ID NO: 1495 - DNA, 16 bp, Artificial Sequence
  Detection oligonucleotide for CCND2
ttatcgtagtcggttt

SEQ ID NO: 1496 - DNA, 18 bp, Artificial Sequence
  Detection oligonucleotide for CCND2
gattttattgtagttggt

SEQ ID NO: 1497 - DNA, 16 bp, Artificial Sequence
  Detection oligonucleotide for CCND2
gagtgaggcgcgaaat

SEQ ID NO: 1498 - DNA, 16 bp, Artificial Sequence
  Detection oligonucleotide for CCND2
gagtgaggtgtgaaat

SEQ ID NO: 1499 - DNA, 16 bp, Artificial Sequence
  Detection oligonucleotide for CCND2
aaggatcgagcgtgga

SEQ ID NO: 1500 - DNA, 16 bp, Artificial Sequence
  Detection oligonucleotide for CCND2
aaggattgagtgtgga

SEQ ID NO: 1501 - DNA, 16 bp, Artificial Sequence
  Detection oligonucleotide for CDKN1A
attagggtcgcgttga

SEQ ID NO: 1502 - DNA, 16 bp, Artificial Sequence
  Detection oligonucleotide for CDKN1A
attagggttgtgttga

SEQ ID NO: 1503 - DNA, 17 bp, Artificial Sequence
  Detection oligonucleotide for CDKN2A
ggcgttgtttaacgtat

SEQ ID NO: 1504 - DNA, 17 bp, Artificial Sequence
  Detection oligonucleotide for CDKN2A
gggtgttgtttaatgta

SEQ ID NO: 1505 - DNA, 16 bp, Artificial Sequence
  Detection oligonucleotide for CDKN2A
aatagttacggtcgga

SEQ ID NO: 1506 - DNA, 16 bp, Artificial Sequence
  Detection oligonucleotide for CDKN2A
agttatggttggaggt

SEQ ID NO: 1507 - DNA, 16 bp, Artificial Sequence
  Detection oligonucleotide for CDKN2A
gtcggaggtcgattta

SEQ ID NO: 1508 - DNA, 17 bp, Artificial Sequence
  Detection oligonucleotide for CDKN2A
ggttggaggttgattta

SEQ ID NO: 1509 - DNA, 16 bp, Artificial Sequence
  Detection oligonucleotide for DAPK1
tttcggagattcggtt

SEQ ID NO: 1510 - DNA, 17 bp, Artificial Sequence
  Detection oligonucleotide for DAPK1
tttggagatttggtttt

SEQ ID NO: 1511 - DNA, 16 bp, Artificial Sequence
  Detection oligonucleotide for DAPK1
ttttagcgtcggggag

SEQ ID NO: 1512 - DNA, 16 bp, Artificial Sequence
  Detection oligonucleotide for DAPK1
ttttagtgttggggag

SEQ ID NO: 1513 - DNA, 20 bp, Artificial Sequence
  Detection oligonucleotide for EYA4
ggtataaaatcgtaaatttt

SEQ ID NO: 1514 - DNA, 20 bp, Artificial Sequence
  Detection oligonucleotide for EYA4
gggtataaaattgtaaattt

SEQ ID NO: 1515 - DNA, 16 bp, Artificial Sequence
  Detection oligonucleotide for EYA4
tatgtagtcgcgtagt

SEQ ID NO: 1516 - DNA, 18 bp, Artificial Sequence
  Detection oligonucleotide for EYA4
tttatgtagttgtgtagt

SEQ ID NO: 1517 - DNA, 18 bp, Artificial Sequence
  Detection oligonucleotide for EYA4
gtttagatacgaaatgtt

SEQ ID NO: 1518 - DNA, 20 bp, Artificial Sequence
  Detection oligonucleotide for EYA4
gtttagatatgaaatgttat

SEQ ID NO: 1519 - DNA, 16 bp, Artificial Sequence
  Detection oligonucleotide for EYA4
agttttgacgtcgttt

SEQ ID NO: 1520 - DNA, 17 bp, Artificial Sequence
  Detection oligonucleotide for EYA4
ttgatgttgttttggaa

SEQ ID NO: 1521 - DNA, 16 bp, Artificial Sequence
  Detection oligonucleotide for FHIT
gttacgttagcgggtt

SEQ ID NO: 1522 - DNA, 16 bp, Artificial Sequence
  Detection oligonucleotide for FHIT
ggttatgttagtgggt

SEQ ID NO: 1523 - DNA, 16 bp, Artificial Sequence
  Detection oligonucleotide for FHIT
ttcggggacgttatag

SEQ ID NO: 1524 - DNA, 16 bp, Artificial Sequence
  Detection oligonucleotide for FHIT
ggtttggggatgttat

SEQ ID NO: 1525 - DNA, 16 bp, Artificial Sequence
  Detection oligonucleotide for GSTP1
ggcgatttcggggatt

SEQ ID NO: 1526 - DNA, 17 bp, Artificial Sequence
  Detection oligonucleotide for GSTP1
ggtgattttggggattt

SEQ ID NO: 1527 - DNA, 16 bp, Artificial Sequence
  Detection oligonucleotide for GSTP1
gacgttcggggtgtag

SEQ ID NO: 1528 - DNA, 16 bp, Artificial Sequence
  Detection oligonucleotide for GSTP1
gatgtttggggtgtag

SEQ ID NO: 1529 - DNA, 16 bp, Artificial Sequence
  Detection oligonucleotide for GSTP1
agttcgcgggattttt

SEQ ID NO: 1530 - DNA, 16 bp, Artificial Sequence
  Detection oligonucleotide for GSTP1
ggagtttgtgggattt

SEQ ID NO: 1531 - DNA, 18 bp, Artificial Sequence
  Detection oligonucleotide for GSTP1
agttttcgttattagtga

SEQ ID NO: 1532 - DNA, 19 bp, Artificial Sequence
  Detection oligonucleotide for GSTP1
tagtttttgttattagtga

SEQ ID NO: 1533 - DNA, 16 bp, Artificial Sequence
  Detection oligonucleotide for HIC1
tatcgaagttttcggg

SEQ ID NO: 1534 - DNA, 17 bp, Artificial Sequence
  Detection oligonucleotide for HIC1
tattgaagtttttgggt

SEQ ID NO: 1535 - DNA, 16 bp, Artificial Sequence
  Detection oligonucleotide for HIC1
tagcggttatttcggt

SEQ ID NO: 1536 - DNA, 18 bp, Artificial Sequence
  Detection oligonucleotide for HIC1
tttagtggttattttggt

SEQ ID NO: 1537 - DNA, 17 bp, Artificial Sequence
  Detection oligonucleotide for HIC1
tacgtttttcgtagcgt

SEQ ID NO: 1538 - DNA, 19 bp, Artificial Sequence
  Detection oligonucleotide for HIC1
attatgttttttgtagtgt

SEQ ID NO: 1539 - DNA, 17 bp, Artificial Sequence
  Detection oligonucleotide for HIC1
ttcggttttgtcgtata

SEQ ID NO: 1540 - DNA, 18 bp, Artificial Sequence
  Detection oligonucleotide for HIC1
tttggttttgttgtatag

SEQ ID NO: 1541 - DNA, 16 bp, Artificial Sequence
  Detection oligonucleotide for MLH1
aggcggcgatagatta

SEQ ID NO: 1542 - DNA, 16 bp, Artificial Sequence
  Detection oligonucleotide for MLH1
atgaggtggtgataga

SEQ ID NO: 1543 - DNA, 16 bp, Artificial Sequence
  Detection oligonucleotide for PGR
tttcgaggtcggattt

SEQ ID NO: 1544 - DNA, 17 bp, Artificial Sequence
  Detection oligonucleotide for PGR
tttgaggttggattttt

SEQ ID NO: 1545 - DNA, 16 bp, Artificial Sequence
  Detection oligonucleotide for PGR
gtgtcgtttagtcgta

SEQ ID NO: 1546 - DNA, 17 bp, Artificial Sequence
  Detection oligonucleotide for PGR
gttgtttagttgtaggt

SEQ ID NO: 1547 - DNA, 17 bp, Artificial Sequence
  Detection oligonucleotide for PGR
ttttttcgacgaaaaga

SEQ ID NO: 1548 - DNA, 18 bp, Artificial Sequence
  Detection oligonucleotide for PGR
aggatttttttgatgaaa

SEQ ID NO: 1549 - DNA, 18 bp, Artificial Sequence
  Detection oligonucleotide for SERPINB5
ttattaacgtgtttgaga

SEQ ID NO: 1550 - DNA, 19 bp, Artificial Sequence
  Detection oligonucleotide for SERPINB5
ttattaatgtgtttgagaa

SEQ ID NO: 1551 - DNA, 16 bp, Artificial Sequence
  Detection oligonucleotide for SERPINB5
attgtcgtacgtatgt

SEQ ID NO: 1552 - DNA, 18 bp, Artificial Sequence
  Detection oligonucleotide for SERPINB5
agaggattgttgtatgta

SEQ ID NO: 1553 - DNA, 18 bp, Artificial Sequence
  Detection oligonucleotide for SERPINB5
ttttttgttcgaatatgt

SEQ ID NO: 1554 - DNA, 18 bp, Artificial Sequence
  Detection oligonucleotide for SERPINB5
tttgtttgaatatgttgg

SEQ ID NO: 1555 - DNA, 16 bp, Artificial Sequence
  Detection oligonucleotide for RARB
atgtcgagaacgcgag

SEQ ID NO: 1556 - DNA, 17 bp, Artificial Sequence
  Detection oligonucleotide for RARB
ggatgttgagaatgtga

SEQ ID NO: 1557 - DNA, 16 bp, Artificial Sequence
  Detection oligonucleotide for RARB
agcgattcgagtaggg

SEQ ID NO: 1558 - DNA, 16 bp, Artificial Sequence
  Detection oligonucleotide for RARB
agtgatttgagtaggg

SEQ ID NO: 1559 - DNA, 16 bp, Artificial Sequence
  Detection oligonucleotide for RARB
taggattcggaacgta

SEQ ID NO: 1560 - DNA, 17 bp, Artificial Sequence
  Detection oligonucleotide for RARB
ggtaggatttggaatgt

SEQ ID NO: 1561 - DNA, 16 bp, Artificial Sequence
  Detection oligonucleotide for SFN
tagtacggtgtcgtat

SEQ ID NO: 1562 - DNA, 17 bp, Artificial Sequence
  Detection oligonucleotide for SFN
gtttagtatggtgttgt

SEQ ID NO: 1563 - DNA, 16 bp, Artificial Sequence
  Detection oligonucleotide for SFN
tacgtatttcgggttt

SEQ ID NO: 1564 - DNA, 19 bp, Artificial Sequence
  Detection oligonucleotide for SFN
tatttatgtattttgggtt

SEQ ID NO: 1565 - DNA, 17 bp, Artificial Sequence
  Detection oligonucleotide for SFN
ttcgtttttcgtaggag

SEQ ID NO: 1566 - DNA, 18 bp, Artificial Sequence
  Detection oligonucleotide for SFN
tttgttttttgtaggaga

SEQ ID NO: 1567 - DNA, 16 bp, Artificial Sequence
  Detection oligonucleotide for TGFBR2
atggggcggacgaata

SEQ ID NO: 1568 - DNA, 16 bp, Artificial Sequence
  Detection oligonucleotide for TGFBR2
atggggtggatgaata

SEQ ID NO: 1569 - DNA, 16 bp, Artificial Sequence
  Detection oligonucleotide for THRB
gggcggttaagtcgag

SEQ ID NO: 1570 - DNA, 16 bp, Artificial Sequence
  Detection oligonucleotide for THRB
gggtggttaagttgag

SEQ ID NO: 1571 - DNA, 17 bp, Artificial Sequence
  Detection oligonucleotide for TIMP3
ttattaacggaggaagg

SEQ ID NO: 1572 - DNA, 17 bp, Artificial Sequence
  Detection oligonucleotide for TIMP3
tattaatggaggaaggg

SEQ ID NO: 1573 - DNA, 18 bp, Artificial Sequence
  Detection oligonucleotide for TIMP3
ttcgttatgtgtacggaa

SEQ ID NO: 1574 - DNA, 18 bp, Artificial Sequence
  Detection oligonucleotide for TIMP3
tttgttatgtgtatggaa

SEQ ID NO: 1575 - DNA, 17 bp, Artificial Sequence
  Detection oligonucleotide for TIMP3
gagtatttcgagtttgt

SEQ ID NO: 1576 - DNA, 19 bp, Artificial Sequence
  Detection oligonucleotide for TIMP3
agtattttgagtttgtatt

SEQ ID NO: 1577 - DNA, 16 bp, Artificial Sequence
  Detection oligonucleotide for TIMP3
taagcgttaatcgagt

SEQ ID NO: 1578 - DNA, 18 bp, Artificial Sequence
  Detection oligonucleotide for TIMP3
taggtaagtgttaattga

SEQ ID NO: 1579 - DNA, 16 bp, Artificial Sequence
  Detection oligonucleotide for TP73
taggattcgcgttttt

SEQ ID NO: 1580 - DNA, 17 bp, Artificial Sequence
  Detection oligonucleotide for TP73
ggtaggatttgtgtttt

SEQ ID NO: 1581 - DNA, 16 bp, Artificial Sequence
  Detection oligonucleotide for TP73
tttcggagttgcgagt

SEQ ID NO: 1582 - DNA, 17 bp, Artificial Sequence
  Detection oligonucleotide for TP73
tagttttggagttgtga

SEQ ID NO: 1583 - DNA, 16 bp, Artificial Sequence
  Detection oligonucleotide for CDH13
taaaacgagggagcgt

SEQ ID NO: 1584 - DNA, 16 bp, Artificial Sequence
  Detection oligonucleotide for CDH13
aaaatgagggagtgtt

SEQ ID NO: 1585 - DNA, 16 bp, Artificial Sequence
  Detection oligonucleotide for CDH13
tagtcgcgtgtatgaa

SEQ ID NO: 1586 - DNA, 17 bp, Artificial Sequence
  Detection oligonucleotide for CDH13
tgtagttgtgtgtatga

SEQ ID NO: 1587 - DNA, 16 bp, Artificial Sequence
  Detection oligonucleotide for CDH13
atgaaaacgtcgtcgg

SEQ ID NO: 1588 - DNA, 17 bp, Artificial Sequence
  Detection oligonucleotide for CDH13
aatgaaaatgttgttgg

SEQ ID NO: 1589 - DNA, 16 bp, Artificial Sequence
  Detection oligonucleotide for CDH13
tagtcgagaatttcgt

SEQ ID NO: 1590 - DNA, 18 bp, Artificial Sequence
  Detection oligonucleotide for CDH13
tgtagttgagaattttgt

SEQ ID NO: 1591 - DNA, 16 bp, Artificial Sequence
  Detection oligonucleotide for TMS1/ASC
ttcgtttcggagtcga

SEQ ID NO: 1592 - DNA, 17 bp, Artificial Sequence
  Detection oligonucleotide for TMS1/ASC
tttgttttggagttgat

SEQ ID NO: 1593 - DNA, 16 bp, Artificial Sequence
  Detection oligonucleotide for APAF1
gtgtcgtagcggtatt

SEQ ID NO: 1594 - DNA, 16 bp, Artificial Sequence
  Detection oligonucleotide for APAF1
ggtgttgtagtggtat

SEQ ID NO: 1595 - DNA, 16 bp, Artificial Sequence
  Detection oligonucleotide for APAF1
agtagcgtcgggtttt

SEQ ID NO: 1596 - DNA, 16 bp, Artificial Sequence
  Detection oligonucleotide for APAF1
gagtagtgttgggttt

SEQ ID NO: 1597 - DNA, 16 bp, Artificial Sequence
  Detection oligonucleotide for SYK
gaagttatcgcgttgg

SEQ ID NO: 1598 - DNA, 17 bp, Artificial Sequence
  Detection oligonucleotide for SYK
agaagttattgtgttgg

SEQ ID NO: 1599 - DNA, 16 bp, Artificial Sequence
  Detection oligonucleotide for SYK
gatcgatgcggtttat

SEQ ID NO: 1600 - DNA, 16 bp, Artificial Sequence
  Detection oligonucleotide for SYK
gggattgatgtggttt

SEQ ID NO: 1601 - DNA, 16 bp, Artificial Sequence
  Detection oligonucleotide for SYK
ggcgttttagtcgatt

SEQ ID NO: 1602 - DNA, 18 bp, Artificial Sequence
  Detection oligonucleotide for SYK
ggtgttttagttgatttt

SEQ ID NO: 1603 - DNA, 16 bp, Artificial Sequence
  Detection oligonucleotide for SYK
ttattcggtcgggatt

SEQ ID NO: 1604 - DNA, 17 bp, Artificial Sequence
  Detection oligonucleotide for SYK
tttatttggttgggatt

SEQ ID NO: 1605 - DNA, 16 bp, Artificial Sequence
  Detection oligonucleotide for FABP3
gatgggcgtattagtt

SEQ ID NO: 1606 - DNA, 16 bp, Artificial Sequence
  Detection oligonucleotide for FABP3
gggatgggtgtattag

SEQ ID NO: 1607 - DNA, 16 bp, Artificial Sequence
  Detection oligonucleotide for FABP3
gtgatgcgagggttat

SEQ ID NO: 1608 - DNA, 16 bp, Artificial Sequence
  Detection oligonucleotide for FABP3
gtgatgtgagggttat

SEQ ID NO: 1609 - DNA, 16 bp, Artificial Sequence
  Detection oligonucleotide for FABP3
taaagcggtagttcgg

SEQ ID NO: 1610 - DNA, 16 bp, Artificial Sequence
  Detection oligonucleotide for FABP3
aagtggtagtttgggt

SEQ ID NO: 1611 - DNA, 16 bp, Artificial Sequence
  Detection oligonucleotide for FABP3
tattggcgttgacgta

SEQ ID NO: 1612 - DNA, 16 bp, Artificial Sequence
  Detection oligonucleotide for FABP3
tggtgttgatgtaggt

SEQ ID NO: 1613 - DNA, 17 bp, Artificial Sequence
  Detection oligonucleotide for RASSF1A
tacgggtattttcgcgt

SEQ ID NO: 1614 - DNA, 18 bp, Artificial Sequence
  Detection oligonucleotide for RASSF1A
atatgggtatttttgtgt

SEQ ID NO: 1615 - DNA, 16 bp, Artificial Sequence
  Detection oligonucleotide for RASSF1A
agagcgcgtttagttt

SEQ ID NO: 1616 - DNA, 17 bp, Artificial Sequence
  Detection oligonucleotide for RASSF1A
gagagtgtgtttagttt

SEQ ID NO: 1617 - DNA, 17 bp, Artificial Sequence
  Detection oligonucleotide for RASSF1A
agtaaatcggattagga

SEQ ID NO: 1618 - DNA, 18 bp, Artificial Sequence
  Detection oligonucleotide for RASSF1A
agtaaattggattaggag

SEQ ID NO: 1619 - DNA, 16 bp, Artificial Sequence
  Detection oligonucleotide for TWIST
agtaaaggcgttgcgt

SEQ ID NO: 1620 - DNA, 16 bp, Artificial Sequence
  Detection oligonucleotide for TWIST
agtaaaggtgttgtgt

SEQ ID NO: 1621 - DNA, 16 bp, Artificial Sequence
  Detection oligonucleotide for TWIST
tatttttcgaggcgta

SEQ ID NO: 1622 - DNA, 17 bp, Artificial Sequence
  Detection oligonucleotide for TWIST
ttttgaggtgtagtttt

SEQ ID NO: 1623 - DNA, 16 bp, Artificial Sequence
  Detection oligonucleotide for TWIST
attgggtcgttgtaga

SEQ ID NO: 1624 - DNA, 16 bp, Artificial Sequence
  Detection oligonucleotide for TWIST
attgggttgttgtaga

SEQ ID NO: 1625 - DNA, 16 bp, Artificial Sequence
  Detection oligonucleotide for TWIST
taggtcgggacgtaaa

SEQ ID NO: 1626 - DNA, 16 bp, Artificial Sequence
  Detection oligonucleotide for TWIST
agtaggttgggatgta

SEQ ID NO: 1627 - DNA, 17 bp, Artificial Sequence
  Detection oligonucleotide for ESR2
gagtattttcgaatcga

SEQ ID NO: 1628 - DNA, 18 bp, Artificial Sequence
  Detection oligonucleotide for ESR2
ggagtatttttgaattga

SEQ ID NO: 1629 - DNA, 17 bp, Artificial Sequence
  Detection oligonucleotide for ESR2
ataagcgatttaacgat

SEQ ID NO: 1630 - DNA, 19 bp, Artificial Sequence
  Detection oligonucleotide for ESR2
aagtgatttaatgataagt

SEQ ID NO: 1631 - DNA, 16 bp, Artificial Sequence
  Detection oligonucleotide for ESR2
tttacgtgatcgagtt

SEQ ID NO: 1632 - DNA, 18 bp, Artificial Sequence
  Detection oligonucleotide for ESR2
agtttatgtgattgagtt

SEQ ID NO: 1633 - DNA, 16 bp, Artificial Sequence
  Detection oligonucleotide for PLAU
tatttgtcgcgttgat

SEQ ID NO: 1634 - DNA, 17 bp, Artificial Sequence
  Detection oligonucleotide for PLAU
atttgttgtgttgatga

SEQ ID NO: 1635 - DNA, 16 bp, Artificial Sequence
  Detection oligonucleotide for PLAU
tgtaattcggggattt

SEQ ID NO: 1636 - DNA, 17 bp, Artificial Sequence
  Detection oligonucleotide for PLAU
ttgtaatttggggattt

SEQ ID NO: 1637 - DNA, 16 bp, Artificial Sequence
  Detection oligonucleotide for PLAU
ttggagatcgcgtttt

SEQ ID NO: 1638 - DNA, 17 bp, Artificial Sequence
  Detection oligonucleotide for PLAU
ttggagattgtgttttt

SEQ ID NO: 1639 - DNA, 16 bp, Artificial Sequence
  Detection oligonucleotide for PLAU
gagcgttgcggaagta

SEQ ID NO: 1640 - DNA, 16 bp, Artificial Sequence
  Detection oligonucleotide for PLAU
gagtgttgtggaagta

SEQ ID NO: 1641 - DNA, 17 bp, Artificial Sequence
  Detection oligonucleotide for STAT1
gttattttcgagagttg

SEQ ID NO: 1642 - DNA, 18 bp, Artificial Sequence
  Detection oligonucleotide for STAT1
gttatttttgagagttgt

SEQ ID NO: 1643 - DNA, 16 bp, Artificial Sequence
  Detection oligonucleotide for BRCA1
agtttcgagagacgtt

SEQ ID NO: 1644 - DNA, 17 bp, Artificial Sequence
  Detection oligonucleotide for BRCA1
agagttttgagagatgt

SEQ ID NO: 1645 - DNA, 16 bp, Artificial Sequence
  Detection oligonucleotide for BRCA1
tttcgtggtaacggaa

SEQ ID NO: 1646 - DNA, 17 bp, Artificial Sequence
  Detection oligonucleotide for BRCA1
tttgtggtaatggaaaa

SEQ ID NO: 1647 - DNA, 16 bp, Artificial Sequence
  Detection oligonucleotide for BRCA1
aaagcgcgggaattat

SEQ ID NO: 1648 - DNA, 16 bp, Artificial Sequence
  Detection oligonucleotide for BRCA1
ggaaaagtgtgggaat

SEQ ID NO: 1649 - DNA, 16 bp, Artificial Sequence
  Detection oligonucleotide for LOT1
atgggtacgtttaagg

SEQ ID NO: 1650 - DNA, 16 bp, Artificial Sequence
  Detection oligonucleotide for LOT1
tgggtatgtttaaggg

SEQ ID NO: 1651 - DNA, 20 bp, Artificial Sequence
  Detection oligonucleotide for LOT1
aaattagttacgttatttaa

SEQ ID NO: 1652 - DNA, 21 bp, Artificial Sequence
  Detection oligonucleotide for LOT1
tgaaattagttatgttattta

SEQ ID NO: 1653 - DNA, 16 bp, Artificial Sequence
  Detection oligonucleotide for LOT1
atgtcggttattacgt

SEQ ID NO: 1654 - DNA, 18 bp, Artificial Sequence
  Detection oligonucleotide for LOT1
tgttggttattatgtaga

SEQ ID NO: 1655 - DNA, 16 bp, Artificial Sequence
  Detection oligonucleotide for PRSS8
agttggcggagtttag

SEQ ID NO: 1656 - DNA, 16 bp, Artificial Sequence
  Detection oligonucleotide for PRSS8
agttggtggagtttag

SEQ ID NO: 1657 - DNA, 18 bp, Artificial Sequence
  Detection oligonucleotide for PRSS8
ttggtgattcgtttatat

SEQ ID NO: 1658 - DNA, 18 bp, Artificial Sequence
  Detection oligonucleotide for PRSS8
gttggtgatttgtttata

SEQ ID NO: 1659 - DNA, 16 bp, Artificial Sequence
  Detection oligonucleotide for PRSS8
tgttcgtttcggatat

SEQ ID NO: 1660 - DNA, 19 bp, Artificial Sequence
  Detection oligonucleotide for PRSS8
tttgttttggatattttag

SEQ ID NO: 1661 - DNA, 16 bp, Artificial Sequence
  Detection oligonucleotide for TPM1
ttgattcgcgttcgta

SEQ ID NO: 1662 - DNA, 17 bp, Artificial Sequence
  Detection oligonucleotide for TPM1
tgatttgtgtttgtaga

SEQ ID NO: 1663 - DNA, 16 bp, Artificial Sequence
  Detection oligonucleotide for SLC19A1
gtcgtgcggtttttaa

SEQ ID NO: 1664 - DNA, 17 bp, Artificial Sequence
  Detection oligonucleotide for SLC19A1
ggttgtgtggtttttaa

SEQ ID NO: 1665 - DNA, 16 bp, Artificial Sequence
  Detection oligonucleotide for SLC19A1
ttacgaaggcggttta

SEQ ID NO: 1666 - DNA, 17 bp, Artificial Sequence
  Detection oligonucleotide for SLC19A1
ttttatgaaggtggttt

SEQ ID NO: 1667 - DNA, 16 bp, Artificial Sequence
  Detection oligonucleotide for GJB2
ggatttcgtcggtatt

SEQ ID NO: 1668 - DNA, 16 bp, Artificial Sequence
  Detection oligonucleotide for GJB2
ggggattttgttggta

SEQ ID NO: 1669 - DNA, 16 bp, Artificial Sequence
  Detection oligonucleotide for GJB2
gaatttcgtttacggt

SEQ ID NO: 1670 - DNA, 18 bp, Artificial Sequence
  Detection oligonucleotide for GJB2
ttgaattttgtttatggt

SEQ ID NO: 1671 - DNA, 16 bp, Artificial Sequence
  Detection oligonucleotide for HS3ST2
gaatcggagaggcgag

SEQ ID NO: 1672 - DNA, 16 bp, Artificial Sequence
  Detection oligonucleotide for HS3ST2
aattggagaggtgagg

SEQ ID NO: 1673 - DNA, 16 bp, Artificial Sequence
  Detection oligonucleotide for HS3ST2
gggtaatcgtttggta

SEQ ID NO: 1674 - DNA, 17 bp, Artificial Sequence
  Detection oligonucleotide for HS3ST2
gggtaattgtttggtat

SEQ ID NO: 1675 - DNA, 16 bp, Artificial Sequence
  Detection oligonucleotide for PRDM2
tgtagagacgacgatt

SEQ ID NO: 1676 - DNA, 18 bp, Artificial Sequence
  Detection oligonucleotide for PRDM2
attgtagagatgatgatt

SEQ ID NO: 1677 - DNA, 16 bp, Artificial Sequence
  Detection oligonucleotide for PRDM2
agagcgcggtagtagt

SEQ ID NO: 1678 - DNA, 16 bp, Artificial Sequence
  Detection oligonucleotide for PRDM2
tgagagtgtggtagta

SEQ ID NO: 1679 - DNA, 16 bp, Artificial Sequence
  Detection oligonucleotide for PRDM2
tgttcgcgatgtttta

SEQ ID NO: 1680 - DNA, 18 bp, Artificial Sequence
  Detection oligonucleotide for PRDM2
tgtttgtgatgttttagt

SEQ ID NO: 1681 - DNA, 20 bp, Artificial Sequence
  Detection oligonucleotide for PRDM2
agtatataaacgtagatttt

SEQ ID NO: 1682 - DNA, 21 bp, Artificial Sequence
  Detection oligonucleotide for PRDM2
aagtatataaatgtagatttt

SEQ ID NO: 1683 - DNA, 16 bp, Artificial Sequence
  Detection oligonucleotide for ALX4
aagtcgatcgttttgt

SEQ ID NO: 1684 - DNA, 17 bp, Artificial Sequence
  Detection oligonucleotide for ALX4
tggaagttgattgtttt

SEQ ID NO: 1685 - DNA, 16 bp, Artificial Sequence
  Detection oligonucleotide for ALX4
tattgcgaggattcgg

SEQ ID NO: 1686 - DNA, 16 bp, Artificial Sequence
  Detection oligonucleotide for ALX4
attgtgaggatttggt

SEQ ID NO: 1687 - DNA, 16 bp, Artificial Sequence
  Detection oligonucleotide for ALX4
ttcgtagcgtagggtt

SEQ ID NO: 1688 - DNA, 17 bp, Artificial Sequence
  Detection oligonucleotide for ALX4
tttgtagtgtagggttt

SEQ ID NO: 1689 - DNA, 16 bp, Artificial Sequence
  Detection oligonucleotide for S100A7
tatagtcggggtgata

SEQ ID NO: 1690 - DNA, 17 bp, Artificial Sequence
  Detection oligonucleotide for S100A7
tttatagttggggtgat

SEQ ID NO: 1691 - DNA, 16 bp, Artificial Sequence
  Detection oligonucleotide for S100A7
agtcgggcgttagtaa

SEQ ID NO: 1692 - DNA, 16 bp, Artificial Sequence
  Detection oligonucleotide for S100A7
gagttgggtgttagta

SEQ ID NO: 1693 - DNA, 16 bp, Artificial Sequence
  Detection oligonucleotide for S100A7
ggatggcggaagttta

SEQ ID NO: 1694 - DNA, 16 bp, Artificial Sequence
  Detection oligonucleotide for S100A7
ggatggtggaagttta

SEQ ID NO: 1695 - DNA, 17 bp, Artificial Sequence
  Detection oligonucleotide for APC
gattcgtatttcgtagt

SEQ ID NO: 1696 - DNA, 17 bp, Artificial Sequence
  Detection oligonucleotide for APC
agcgttttggttcgtat

SEQ ID NO: 1697 - DNA, 17 bp, Artificial Sequence
  Detection oligonucleotide for APC
agtgttttggtttgtat

SEQ ID NO: 1698 - DNA, 16 bp, Artificial Sequence
  Detection oligonucleotide for APC
ttaatcggcgggtttt

SEQ ID NO: 1699 - DNA, 16 bp, Artificial Sequence
  Detection oligonucleotide for APC
agttaattggtgggtt

SEQ ID NO: 1700 - DNA, 16 bp, Artificial Sequence
  Detection oligonucleotide for APC
attttcgagttcggta

SEQ ID NO: 1701 - DNA, 17 bp, Artificial Sequence
  Detection oligonucleotide for APC
tttttgagtttggtagt

SEQ ID NO: 1702 - DNA, 18 bp, Artificial Sequence
  Detection oligonucleotide for BRCA2
attcgttttagaggcgta

SEQ ID NO: 1703 - DNA, 18 bp, Artificial Sequence
  Detection oligonucleotide for BRCA2
atttgttttagaggtgta

SEQ ID NO: 1704 - DNA, 18 bp, Artificial Sequence
  Detection oligonucleotide for SEQ ID NO:2
taggtatacgaaagagta

SEQ ID NO: 1705 - DNA, 19 bp, Artificial Sequence
  Detection oligonucleotide for SEQ ID NO:2
ttaggtatatgaaagagta

SEQ ID NO: 1706 - DNA, 16 bp, Artificial Sequence
  Detection oligonucleotide for SEQ ID NO:2
ttgattggcggacgag

SEQ ID NO: 1707 - DNA, 16 bp, Artificial Sequence
  Detection oligonucleotide for SEQ ID NO:2
ttgattggtggatgag

SEQ ID NO: 1708 - DNA, 16 bp, Artificial Sequence
  Detection oligonucleotide for IGFBP7
tagtcgcggaatgtta

SEQ ID NO: 1709 - DNA, 16 bp, Artificial Sequence
  Detection oligonucleotide for IGFBP7
ttggtagttgtggaat

SEQ ID NO: 1710 - DNA, 16 bp, Artificial Sequence
  Detection oligonucleotide for IGFBP7
attttttcgcgggtat

SEQ ID NO: 1711 - DNA, 18 bp, Artificial Sequence
  Detection oligonucleotide for IGFBP7
tttttgtgggtattttag

SEQ ID NO: 1712 - DNA, 16 bp, Artificial Sequence
  Detection oligonucleotide for IGFBP7
ggtatattcgacgggg

SEQ ID NO: 1713 - DNA, 17 bp, Artificial Sequence
  Detection oligonucleotide for IGFBP7
gggtatatttgatgggg

SEQ ID NO: 1714 - DNA, 16 bp, Artificial Sequence
  Detection oligonucleotide for IGFBP7
ggtacgagcgtttttt

SEQ ID NO: 1715 - DNA, 16 bp, Artificial Sequence
  Detection oligonucleotide for IGFBP7
tgggtatgagtgtttt

SEQ ID NO: 1716 - DNA, 18 bp, Artificial Sequence
  Detection oligonucleotide for IGFBP7
aaagcgtatttaattcgt

SEQ ID NO: 1717 - DNA, 19 bp, Artificial Sequence
  Detection oligonucleotide for IGFBP7
agtgtatttaatttgtgtt

SEQ ID NO: 1718 - DNA, 17 bp, Artificial Sequence
  Detection oligonucleotide for SOD2
gtcgtttagtcggttta

SEQ ID NO: 1719 - DNA, 18 bp, Artificial Sequence
  Detection oligonucleotide for SOD2
gttgtttagttggtttat

SEQ ID NO: 1720 - DNA, 16 bp, Artificial Sequence
  Detection oligonucleotide for SOD2
tattaggcggttgcgg

SEQ ID NO: 1721 - DNA, 16 bp, Artificial Sequence
  Detection oligonucleotide for SOD2
tattaggtggttgtgg

SEQ ID NO: 1722 - DNA, 16 bp, Artificial Sequence
  Detection oligonucleotide for SOD2
tacggttcgaaggttt

SEQ ID NO: 1723 - DNA, 16 bp, Artificial Sequence
  Detection oligonucleotide for SOD2
agttggtatggtttga

SEQ ID NO: 1724 - DNA, 18 bp, Artificial Sequence
  Detection oligonucleotide for NME1
aattcgagattagttcgg

SEQ ID NO: 1725 - DNA, 18 bp, Artificial Sequence
  Detection oligonucleotide for NME1
aatttgagattagtttgg

SEQ ID NO: 1726 - DNA, 16 bp, Artificial Sequence
  Detection oligonucleotide for THBS1
taaaggggcgttcgta

SEQ ID NO: 1727 - DNA, 16 bp, Artificial Sequence
  Detection oligonucleotide for THBS1
aaggggtgtttgtatt

SEQ ID NO: 1728 - DNA, 16 bp, Artificial Sequence
  Detection oligonucleotide for THBS1
ggttagttcgggcgta

SEQ ID NO: 1729 - DNA, 16 bp, Artificial Sequence
  Detection oligonucleotide for THBS1
ggttagtttgggtgta

SEQ ID NO: 1730 - DNA, 16 bp, Artificial Sequence
  Detection oligonucleotide for THBS1
ttgtgcgttcggagta

SEQ ID NO: 1731 - DNA, 16 bp, Artificial Sequence
  Detection oligonucleotide for THBS1
tgtgtttggagtagag

SEQ ID NO: 1732 - DNA, 16 bp, Artificial Sequence
  Detection oligonucleotide for ESR1
aaatcggcgggttatt

SEQ ID NO: 1733 - DNA, 16 bp, Artificial Sequence
  Detection oligonucleotide for ESR1
agaaattggtgggtta

SEQ ID NO: 1734 - DNA, 16 bp, Artificial Sequence
  Detection oligonucleotide for ESR1
agttgcggacggttta

SEQ ID NO: 1735 - DNA, 16 bp, Artificial Sequence
  Detection oligonucleotide for ESR1
agttgtggatggttta

SEQ ID NO: 1736 - DNA, 16 bp, Artificial Sequence
  Detection oligonucleotide for IL6
ttcggttatacgtagg

SEQ ID NO: 1737 - DNA, 18 bp, Artificial Sequence
  Detection oligonucleotide for IL6
ttttggttatatgtaggg

SEQ ID NO: 1738 - DNA, 17 bp, Artificial Sequence
  Detection oligonucleotide for IL6
agtttagtcggtttcgt

SEQ ID NO: 1739 - DNA, 17 bp, Artificial Sequence
  Detection oligonucleotide for IL6
agtttagttggttttgt

SEQ ID NO: 1740 - DNA, 16 bp, Artificial Sequence
  Detection oligonucleotide for CASP8
tgtattcgaggcggta

SEQ ID NO: 1741 - DNA, 16 bp, Artificial Sequence
  Detection oligonucleotide for CASP8
ttgtatttgaggtggt

SEQ ID NO: 1742 - DNA, 18 bp, Artificial Sequence
  Detection oligonucleotide for CASP8
attttttaaacgggttta

SEQ ID NO: 1743 - DNA, 19 bp, Artificial Sequence
  Detection oligonucleotide for CASP8
ttttaaatgggtttatagg

SEQ ID NO: 1744 - DNA, 16 bp, Artificial Sequence
  Detection oligonucleotide for CASP8
atcgtagttttcgagt

SEQ ID NO: 1745 - DNA, 18 bp, Artificial Sequence
  Detection oligonucleotide for CASP8
attgtagtttttgagttt

SEQ ID NO: 1746 - DNA, 16 bp, Artificial Sequence
  Detection oligonucleotide for HOXA5
ttcgagttcggttgaa

SEQ ID NO: 1747 - DNA, 17 bp, Artificial Sequence
  Detection oligonucleotide for HOXA5
gtttgagtttggttgaa

SEQ ID NO: 1748 - DNA, 16 bp, Artificial Sequence
  Detection oligonucleotide for HOXA5
tagttttcggtcggaa

SEQ ID NO: 1749 - DNA, 17 bp, Artificial Sequence
  Detection oligonucleotide for HOXA5
tagtttttggttggaag

SEQ ID NO: 1750 - DNA, 17 bp, Artificial Sequence
  Detection oligonucleotide for HOXA5
taattcgatttcggttt

SEQ ID NO: 1751 - DNA, 19 bp, Artificial Sequence
  Detection oligonucleotide for HOXA5
tttaatttgattttggttt

SEQ ID NO: 1752 - DNA, 17 bp, Artificial Sequence
  Detection oligonucleotide for HOXA5
atcggtagttgacggtt

SEQ ID NO: 1753 - DNA, 17 bp, Artificial Sequence
  Detection oligonucleotide for HOXA5
attggtagttgatggtt

SEQ ID NO: 1754 - DNA, 16 bp, Artificial Sequence
  Detection oligonucleotide for RARA
ttcgggatgtacgttt

SEQ ID NO: 1755 - DNA, 17 bp, Artificial Sequence
  Detection oligonucleotide for RARA
tttgggatgtatgtttt

SEQ ID NO: 1756 - DNA, 18 bp, Artificial Sequence
  Detection oligonucleotide for RARA
gaattagtatcggttttt

SEQ ID NO: 1757 - DNA, 18 bp, Artificial Sequence
  Detection oligonucleotide for RARA
attagtattggtttttgg

SEQ ID NO: 1758 - DNA, 17 bp, Artificial Sequence
  Detection oligonucleotide for SNCG
tgcggtagtattcgagt

SEQ ID NO: 1759 - DNA, 17 bp, Artificial Sequence
  Detection oligonucleotide for SNCG
tgtggtagtatttgagt

SEQ ID NO: 1760 - DNA, 16 bp, Artificial Sequence
  Detection oligonucleotide for GPC3
aatagtcgcgtttagg

SEQ ID NO: 1761 - DNA, 17 bp, Artificial Sequence
  Detection oligonucleotide for GPC3
tagttgtgtttagggat

SEQ ID NO: 1762 - DNA, 20 bp, Artificial Sequence
  Detection oligonucleotide for GPC3
tttaacgtagttttgatcgg

SEQ ID NO: 1763 - DNA, 20 bp, Artificial Sequence
  Detection oligonucleotide for GPC3
tttaatgtagttttgattgg

SEQ ID NO: 1764 - DNA, 16 bp, Artificial Sequence
  Detection oligonucleotide for CLDN7
ttacgttaagtcgggt

SEQ ID NO: 1765 - DNA, 17 bp, Artificial Sequence
  Detection oligonucleotide for CLDN7
agttatgttaagttggg

SEQ ID NO: 1766 - DNA, 16 bp, Artificial Sequence
  Detection oligonucleotide for CLDN7
tagcgttttaggcgta

SEQ ID NO: 1767 - DNA, 18 bp, Artificial Sequence
  Detection oligonucleotide for CLDN7
tagtgttttaggtgtatt

SEQ ID NO: 1768 - DNA, 16 bp, Artificial Sequence
  Detection oligonucleotide for CLDN7
ttaggggcgtttcgta

SEQ ID NO: 1769 - DNA, 17 bp, Artificial Sequence
  Detection oligonucleotide for CLDN7
ttaggggtgttttgtag

SEQ ID NO: 1770 - DNA, 16 bp, Artificial Sequence
  Detection oligonucleotide for CLDN7
tagaattcggcgggga

SEQ ID NO: 1771 - DNA, 16 bp, Artificial Sequence
  Detection oligonucleotide for CLDN7
tagaatttggtgggga

SEQ ID NO: 1772 - DNA, 17 bp, Artificial Sequence
  Detection oligonucleotide for SLIT2
ttcgatagttaacgatg

SEQ ID NO: 1773 - DNA, 19 bp, Artificial Sequence
  Detection oligonucleotide for SLIT2
tttgatagttaatgatggt

SEQ ID NO: 1774 - DNA, 16 bp, Artificial Sequence
  Detection oligonucleotide for SLIT2
atttcgtcgtagtttg

SEQ ID NO: 1775 - DNA, 17 bp, Artificial Sequence
  Detection oligonucleotide for SLIT2
ttttgttgtagtttgga

SEQ ID NO: 1776 - DNA, 16 bp, Artificial Sequence
  Detection oligonucleotide for SLIT2
tagcgggttcgtagta

SEQ ID NO: 1777 - DNA, 17 bp, Artificial Sequence
  Detection oligonucleotide for SLIT2
ttagtgggtttgtagta

SEQ ID NO: 1778 - DNA, 16 bp, Artificial Sequence
  Detection oligonucleotide for SLIT2
aaggcgcggaagttta

SEQ ID NO: 1779 - DNA, 16 bp, Artificial Sequence
  Detection oligonucleotide for SLIT2
aaggtgtggaagttta

SEQ ID NO: 1780 - DNA, 16 bp, Artificial Sequence
  Detection oligonucleotide for IGSF4
aggtagatcgaggagg

SEQ ID NO: 1781 - DNA, 16 bp, Artificial Sequence
  Detection oligonucleotide for IGSF4
aggtagattgaggagg

SEQ ID NO: 1782 - DNA, 16 bp, Artificial Sequence
  Detection oligonucleotide for IGSF4
tagtcgtagagtcggg

SEQ ID NO: 1783 - DNA, 16 bp, Artificial Sequence
  Detection oligonucleotide for IGSF4
gttgtagagttgggtt

SEQ ID NO: 1784 - DNA, 16 bp, Artificial Sequence
  Detection oligonucleotide for IGSF4
taggttttcggattga

SEQ ID NO: 1785 - DNA, 17 bp, Artificial Sequence
  Detection oligonucleotide for IGSF4
gtaggtttttggattga

SEQ ID NO: 1786 - DNA, 16 bp, Artificial Sequence
  Detection oligonucleotide for MCT1
attttacgtaggcgtt

SEQ ID NO: 1787 - DNA, 18 bp, Artificial Sequence
  Detection oligonucleotide for MCT1
gattttatgtaggtgttt

SEQ ID NO: 1788 - DNA, 16 bp, Artificial Sequence
  Detection oligonucleotide for MCT1
agttagtcgcgtttta

SEQ ID NO: 1789 - DNA, 18 bp, Artificial Sequence
  Detection oligonucleotide for MCT1
agagttagttgtgtttta

SEQ ID NO: 1790 - DNA, 17 bp, Artificial Sequence
  Detection oligonucleotide for MCT1
tatacgaggaaggtcgg

SEQ ID NO: 1791 - DNA, 17 bp, Artificial Sequence
  Detection oligonucleotide for MCT1
tatatgaggaaggttgg

SEQ ID NO: 1792 - DNA, 16 bp, Artificial Sequence
  Detection oligonucleotide for SEQ ID NO:6
aagtttatcggcgttt

SEQ ID NO: 1793 - DNA, 18 bp, Artificial Sequence
  Detection oligonucleotide for SEQ ID NO:6
agaagtttattggtgttt

SEQ ID NO: 1794 - DNA, 18 bp, Artificial Sequence
  Detection oligonucleotide for SEQ ID NO:6
atttcggaatttaagcgt

SEQ ID NO: 1795 - DNA, 18 bp, Artificial Sequence
  Detection oligonucleotide for SEQ ID NO:6
ttttggaatttaagtgtt

SEQ ID NO: 1796 - DNA, 16 bp, Artificial Sequence
  Detection oligonucleotide for SEQ ID NO:6
taatttcggacgcgga

SEQ ID NO: 1797 - DNA, 16 bp, Artificial Sequence
  Detection oligonucleotide for SEQ ID NO:6
ttttggatgtggagga

SEQ ID NO: 1798 - DNA, 16 bp, Artificial Sequence
  Detection oligonucleotide for SEQ ID NO:6
ttacggtgaaggcgga

SEQ ID NO: 1799 - DNA, 16 bp, Artificial Sequence
  Detection oligonucleotide for SEQ ID NO:6
ttatggtgaaggtgga

SEQ ID NO: 1800 - DNA, 17 bp, Artificial Sequence
  Detection oligonucleotide for SEQ ID NO:6
tttcggttttcgttaat

SEQ ID NO: 1801 - DNA, 20 bp, Artificial Sequence
  Detection oligonucleotide for SEQ ID NO:6
tttggtttttgttaatttag

SEQ ID NO: 1802 - DNA, 16 bp, Artificial Sequence
  Detection oligonucleotide for SEQ ID NO:6
tgtgcgaagttaacgt

SEQ ID NO: 1803 - DNA, 17 bp, Artificial Sequence
  Detection oligonucleotide for SEQ ID NO:6
ttgtgtgaagttaatgt

SEQ ID NO: 1804 - DNA, 16 bp, Artificial Sequence
  Detection oligonucleotide for SEQ ID NO:8
ataaagcggggtttta

SEQ ID NO: 1805 - DNA, 16 bp, Artificial Sequence
  Detection oligonucleotide for SEQ ID NO:8
ggataaagtggggttt

SEQ ID NO: 1806 - DNA, 16 bp, Artificial Sequence
  Detection oligonucleotide for SEQ ID NO:8
aggaggcgagaaattt

SEQ ID NO: 1807 - DNA, 16 bp, Artificial Sequence
  Detection oligonucleotide for SEQ ID NO:8
gaggaggtgagaaatt

SEQ ID NO: 1808 - DNA, 16 bp, Artificial Sequence
  Detection oligonucleotide for SEQ ID NO:8
agaaatttcggggtag

SEQ ID NO: 1809 - DNA, 17 bp, Artificial Sequence
  Detection oligonucleotide for SEQ ID NO:8
gaaattttggggtagta

SEQ ID NO: 1810 - DNA, 18 bp, Artificial Sequence
  Detection oligonucleotide for SEQ ID NO:8
ggtagtatcgtttataga

SEQ ID NO: 1811 - DNA, 18 bp, Artificial Sequence
  Detection oligonucleotide for SEQ ID NO:8
ggggtagtattgtttata

SEQ ID NO: 1812 - DNA, 17 bp, Artificial Sequence
  Detection oligonucleotide for PROSTAGLANDIN E2 RECEPTOR, EP4 SUBTYPE (PROSTANOID EP4 RECEPTOR) (PGE RECEPTOR, EP4 SUBTYPE)
agtgtatcgtttttcgg

SEQ ID NO: 1813 - DNA, 18 bp, Artificial Sequence
  Detection oligonucleotide for PROSTAGLANDIN E2 RECEPTOR, EP4 SUBTYPE (PROSTANOID EP4 RECEPTOR) (PGE RECEPTOR, EP4 SUBTYPE)
tagtgtattgttttttgg

SEQ ID NO: 1814 - DNA, 16 bp, Artificial Sequence
  Detection oligonucleotide for PROSTAGLANDIN E2 RECEPTOR, EP4 SUBTYPE (PROSTANOID EP4 RECEPTOR) (PGE RECEPTOR, EP4 SUBTYPE)
tgcgtatcgttagtta

SEQ ID NO: 1815 - DNA, 17 bp, Artificial Sequence
  Detection oligonucleotide for PROSTAGLANDIN E2 RECEPTOR, EP4 SUBTYPE (PROSTANOID EP4 RECEPTOR) (PGE RECEPTOR, EP4 SUBTYPE)
aggttgtgtattgttag

SEQ ID NO: 1816 - DNA, 16 bp, Artificial Sequence
  Detection oligonucleotide for PROSTAGLANDIN E2 RECEPTOR, EP4 SUBTYPE (PROSTANOID EP4 RECEPTOR) (PGE RECEPTOR, EP4 SUBTYPE)
attatttcggcggtga

SEQ ID NO: 1817 - DNA, 17 bp, Artificial Sequence
  Detection oligonucleotide for PROSTAGLANDIN E2 RECEPTOR, EP4 SUBTYPE (PROSTANOID EP4 RECEPTOR) (PGE RECEPTOR, EP4 SUBTYPE)
gattattttggtggtga

SEQ ID NO: 1818 - DNA, 16 bp, Artificial Sequence
  Detection oligonucleotide for PROSTAGLANDIN E2 RECEPTOR, EP4 SUBTYPE (PROSTANOID EP4 RECEPTOR) (PGE RECEPTOR, EP4 SUBTYPE)
taagtcgcgtaaggag

SEQ ID NO: 1819 - DNA, 17 bp, Artificial Sequence
  Detection oligonucleotide for PROSTAGLANDIN E2 RECEPTOR, EP4 SUBTYPE (PROSTANOID EP4 RECEPTOR) (PGE RECEPTOR, EP4 SUBTYPE)
aagttgtgtaaggagta

SEQ ID NO: 1820 - DNA, 16 bp, Artificial Sequence
  Detection oligonucleotide for PROSTAGLANDIN E2 RECEPTOR, EP4 SUBTYPE (PROSTANOID EP4 RECEPTOR) (PGE RECEPTOR, EP4 SUBTYPE)
gtatcgcgagtttgga

SEQ ID NO: 1821 - DNA, 17 bp, Artificial Sequence
  Detection oligonucleotide for PROSTAGLANDIN E2 RECEPTOR, EP4 SUBTYPE (PROSTANOID EP4 RECEPTOR) (PGE RECEPTOR, EP4 SUBTYPE)
gtattgtgagtttggag

SEQ ID NO: 1822 - DNA, 16 bp, Artificial Sequence
  Detection oligonucleotide for SEQ ID NO:51
gtcggggtcgattcga

SEQ ID NO: 1823 - DNA, 17 bp, Artificial Sequence
  Detection oligonucleotide for SEQ ID NO:51
gttggggttgatttgat

SEQ ID NO: 1824 - DNA, 16 bp, Artificial Sequence
  Detection oligonucleotide for SEQ ID NO:51
aggattcgtttgcgtt

SEQ ID NO: 1825 - DNA, 17 bp, Artificial Sequence
  Detection oligonucleotide for SEQ ID NO:51
aaggatttgtttgtgtt

SEQ ID NO: 1826 - DNA, 16 bp, Artificial Sequence
  Detection oligonucleotide for MGC34831
attagcgtttggcgtt

SEQ ID NO: 1827 - DNA, 17 bp, Artificial Sequence
  Detection oligonucleotide for MGC34831
aattagtgtttggtgtt

SEQ ID NO: 1828 - DNA, 16 bp, Artificial Sequence
  Detection oligonucleotide for MGC34831
gtttagcgacggtcgt

SEQ ID NO: 1829 - DNA, 17 bp, Artificial Sequence
  Detection oligonucleotide for MGC34831
tgtttagtgatggttgt

SEQ ID NO: 1830 - DNA, 16 bp, Artificial Sequence
  Detection oligonucleotide for SEQ ID NO:54
tgtgtagcggcgatta

SEQ ID NO: 1831 - DNA, 16 bp, Artificial Sequence
  Detection oligonucleotide for SEQ ID NO:54
gtgtgtagtggtgatt

SEQ ID NO: 1832 - DNA, 16 bp, Artificial Sequence
  Detection oligonucleotide for SEQ ID NO:54
attagcgtttggtcgg

SEQ ID NO: 1833 - DNA, 17 bp, Artificial Sequence
  Detection oligonucleotide for SEQ ID NO:54
attagtgtttggttggg

SEQ ID NO: 1834 - DNA, 16 bp, Artificial Sequence
  Detection oligonucleotide for PDLIM1
taggtcgcgtagtcgt

SEQ ID NO: 1835 - DNA, 17 bp, Artificial Sequence
  Detection oligonucleotide for PDLIM1
ttaggttgtgtagttgt

SEQ ID NO: 1836 - DNA, 16 bp, Artificial Sequence
  Detection oligonucleotide for SEQ ID NO:15
aatcgtgcggttgata

SEQ ID NO: 1837 - DNA, 16 bp, Artificial Sequence
  Detection oligonucleotide for SEQ ID NO:15
tgtagaattgtgtggt

SEQ ID NO: 1838 - DNA, 18 bp, Artificial Sequence
  Detection oligonucleotide for SEQ ID NO:15
ttgcgtagaaaattcgag

SEQ ID NO: 1839 - DNA, 18 bp, Artificial Sequence
  Detection oligonucleotide for SEQ ID NO:15
ttgtgtagaaaatttgag

SEQ ID NO: 1840 - DNA, 16 bp, Artificial Sequence
  Detection oligonucleotide for SEQ ID NO:15
aaaattcgaggtcggg

SEQ ID NO: 1841 - DNA, 16 bp, Artificial Sequence
  Detection oligonucleotide for SEQ ID NO:15
aaaatttgaggttggg

SEQ ID NO: 1842 - DNA, 17 bp, Artificial Sequence
  Detection oligonucleotide for DKK3
attcgttttagttcgag

SEQ ID NO: 1843 - DNA, 18 bp, Artificial Sequence
  Detection oligonucleotide for DKK3
atttgttttagtttgagt

SEQ ID NO: 1844 - DNA, 16 bp, Artificial Sequence
  Detection oligonucleotide for DKK3
ttcgatcgttttagga

SEQ ID NO: 1845 - DNA, 18 bp, Artificial Sequence
  Detection oligonucleotide for DKK3
agttttgattgttttagg

SEQ ID NO: 1846 - DNA, 16 bp, Artificial Sequence
  Detection oligonucleotide for DKK3
attcgttcggagacgg

SEQ ID NO: 1847 - DNA, 16 bp, Artificial Sequence
  Detection oligonucleotide for DKK3
tttgtttggagatggg

SEQ ID NO: 1848 - DNA, 16 bp, Artificial Sequence
  Detection oligonucleotide for DKK3
gaaaagacgcgatttt

SEQ ID NO: 1849 - DNA, 19 bp, Artificial Sequence
  Detection oligonucleotide for DKK3
gaaaagatgtgattttatt

SEQ ID NO: 1850 - DNA, 16 bp, Artificial Sequence
  Detection oligonucleotide for SEQ ID NO:28
tatcgacgtttttggt

SEQ ID NO: 1851 - DNA, 18 bp, Artificial Sequence
  Detection oligonucleotide for SEQ ID NO:28
tattgatgtttttggttt

SEQ ID NO: 1852 - DNA, 16 bp, Artificial Sequence
  Detection oligonucleotide for SEQ ID NO:29
ttgatgcggagttcga

SEQ ID NO: 1853 - DNA, 16 bp, Artificial Sequence
  Detection oligonucleotide for SEQ ID NO:29
ttgatgtggagtttga

SEQ ID NO: 1854 - DNA, 16 bp, Artificial Sequence
  Detection oligonucleotide for SEQ ID NO:29
taggaacggtaggcgg

SEQ ID NO: 1855 - DNA, 16 bp, Artificial Sequence
  Detection oligonucleotide for SEQ ID NO:29
taggaatggtaggtgg

SEQ ID NO: 1856 - DNA, 16 bp, Artificial Sequence
  Detection oligonucleotide for SEQ ID NO:29
gtcggaggcgtttgag

SEQ ID NO: 1857 - DNA, 17 bp, Artificial Sequence
  Detection oligonucleotide for SEQ ID NO:29
gttggaggtgtttgaga

SEQ ID NO: 1858 - DNA, 19 bp, Artificial Sequence
  Detection oligonucleotide for ARL7
tagatttcgtagtttttta

SEQ ID NO: 1859 - DNA, 20 bp, Artificial Sequence
  Detection oligonucleotide for ARL7
tagattttgtagttttttaa

SEQ ID NO: 1860 - DNA, 16 bp, Artificial Sequence
  Detection oligonucleotide for ARL7
tgggtacgtttacggt

SEQ ID NO: 1861 - DNA, 17 bp, Artificial Sequence
  Detection oligonucleotide for ARL7
tgggtatgtttatggtt

SEQ ID NO: 1862 - DNA, 17 bp, Artificial Sequence
  Detection oligonucleotide for ARL7
gaagaaatcgtttttgt

SEQ ID NO: 1863 - DNA, 18 bp, Artificial Sequence
  Detection oligonucleotide for ARL7
gaagaaattgtttttgtt

SEQ ID NO: 1864 - DNA, 17 bp, Artificial Sequence
  Detection oligonucleotide for ARL7
tagtaggatcggttttt

SEQ ID NO: 1865 - DNA, 18 bp, Artificial Sequence
  Detection oligonucleotide for ARL7
atagtaggattggttttt

SEQ ID NO: 1866 - DNA, 16 bp, Artificial Sequence
  Detection oligonucleotide for SEQ ID NO:31
aacgttgcgttgggta

SEQ ID NO: 1867 - DNA, 17 bp, Artificial Sequence
  Detection oligonucleotide for SEQ ID NO:31
aatgttgtgttgggtaa

SEQ ID NO: 1868 - DNA, 16 bp, Artificial Sequence
  Detection oligonucleotide for SEQ ID NO:31
tagcgtttcgtggtta

SEQ ID NO: 1869 - DNA, 17 bp, Artificial Sequence
  Detection oligonucleotide for SEQ ID NO:31
gtagtgttttgtggtta

SEQ ID NO: 1870 - DNA, 18 bp, Artificial Sequence
  Detection oligonucleotide for THH
ttcggaagaaaagcgaat

SEQ ID NO: 1871 - DNA, 18 bp, Artificial Sequence
  Detection oligonucleotide for THH
tttggaagaaaagtgaat

SEQ ID NO: 1872 - DNA, 16 bp, Artificial Sequence
  Detection oligonucleotide for THH
gttcgttggcgtaaat

SEQ ID NO: 1873 - DNA, 17 bp, Artificial Sequence
  Detection oligonucleotide for THH
ggtttgttggtgtaaat

SEQ ID NO: 1874 - DNA, 17 bp, Artificial Sequence
  Detection oligonucleotide for THH
tattcggaagtgatcgg

SEQ ID NO: 1875 - DNA, 17 bp, Artificial Sequence
  Detection oligonucleotide for THH
tatttggaagtgattgg

SEQ ID NO: 1876 - DNA, 16 bp, Artificial Sequence
  Detection oligonucleotide for SENP3
tattcggatcgggttt

SEQ ID NO: 1877 - DNA, 17 bp, Artificial Sequence
  Detection oligonucleotide for SENP3
tttatttggattgggtt

SEQ ID NO: 1878 - DNA, 18 bp, Artificial Sequence
  Detection oligonucleotide for SENP3
tagtcgaaagtaggacgt

SEQ ID NO: 1879 - DNA, 18 bp, Artificial Sequence
  Detection oligonucleotide for SENP3
tagttgaaagtaggatgt

SEQ ID NO: 1880 - DNA, 17 bp, Artificial Sequence
  Detection oligonucleotide for SENP3
aggacgtttttgatcgg

SEQ ID NO: 1881 - DNA, 17 bp, Artificial Sequence
  Detection oligonucleotide for SENP3
aggatgtttttgattgg

SEQ ID NO: 1882 - DNA, 17 bp, Artificial Sequence
  Detection oligonucleotide for SENP3
agttatcgttaggaggg

SEQ ID NO: 1883 - DNA, 17 bp, Artificial Sequence
  Detection oligonucleotide for SENP3
agttattgttaggaggg

SEQ ID NO: 1884 - DNA, 16 bp, Artificial Sequence
  Detection oligonucleotide for SEQ ID NO:42
gagtcgggttgcgatg

SEQ ID NO: 1885 - DNA, 16 bp, Artificial Sequence
  Detection oligonucleotide for SEQ ID NO:42
ggagttgggttgtgat

SEQ ID NO: 1886 - DNA, 17 bp, Artificial Sequence
  Detection oligonucleotide for SEQ ID NO:42
atgggttgcgattttta

SEQ ID NO: 1887 - DNA, 17 bp, Artificial Sequence
  Detection oligonucleotide for SEQ ID NO:42
atgggttgtgattttta

SEQ ID NO: 1888 - DNA, 18 bp, Artificial Sequence
  Detection oligonucleotide for SEQ ID NO:117
tagcggttttttagcgta

SEQ ID NO: 1889 - DNA, 18 bp, Artificial Sequence
  Detection oligonucleotide for SEQ ID NO:117
agtggttttttagtgtat

SEQ ID NO: 1890 - DNA, 16 bp, Artificial Sequence
  Detection oligonucleotide for SEQ ID NO:117
agatgcgcgggtagat

SEQ ID NO: 1891 - DNA, 16 bp, Artificial Sequence
  Detection oligonucleotide for SEQ ID NO:117
agatgtgtgggtagat

SEQ ID NO: 1892 - DNA, 17 bp, Artificial Sequence
  Detection oligonucleotide for SEQ ID NO:117
agatagttcgtattcgt

SEQ ID NO: 1893 - DNA, 19 bp, Artificial Sequence
  Detection oligonucleotide for SEQ ID NO:117
gtagatagtttgtatttgt

SEQ ID NO: 1894 - DNA, 16 bp, Artificial Sequence
  Detection oligonucleotide for SEQ ID NO:117
tttgttcgtaacgttt

SEQ ID NO: 1895 - DNA, 18 bp, Artificial Sequence
  Detection oligonucleotide for SEQ ID NO:117
tgtttgtaatgtttagag

SEQ ID NO: 1896 - DNA, 18 bp, Artificial Sequence
  Detection oligonucleotide for O60279
agtaaacgaataagaagt

SEQ ID NO: 1897 - DNA, 19 bp, Artificial Sequence
  Detection oligonucleotide for O60279
aagtaaatgaataagaagt

SEQ ID NO: 1898 - DNA, 17 bp, Artificial Sequence
  Detection oligonucleotide for O60279
tacgttttttcggatta

SEQ ID NO: 1899 - DNA, 19 bp, Artificial Sequence
  Detection oligonucleotide for O60279
tatgtttttttggattaag

SEQ ID NO: 1900 - DNA, 16 bp, Artificial Sequence
  Detection oligonucleotide for O60279
taattatcggcggtgt

SEQ ID NO: 1901 - DNA, 17 bp, Artificial Sequence
  Detection oligonucleotide for O60279
attattggtggtgtttt

SEQ ID NO: 1902 - DNA, 16 bp, Artificial Sequence
  Detection oligonucleotide for O60279
ggacggcggaaaatta

SEQ ID NO: 1903 - DNA, 16 bp, Artificial Sequence
  Detection oligonucleotide for O60279
agggatggtggaaaat

SEQ ID NO: 1904 - DNA, 16 bp, Artificial Sequence
  Detection oligonucleotide for SEQ ID NO:48
tatttggcgattcgga

SEQ ID NO: 1905 - DNA, 16 bp, Artificial Sequence
  Detection oligonucleotide for SEQ ID NO:48
tggtgatttggagatt

SEQ ID NO: 1906 - DNA, 16 bp, Artificial Sequence
  Detection oligonucleotide for SEQ ID NO:48
tagggttacgtgtcgg

SEQ ID NO: 1907 - DNA, 16 bp, Artificial Sequence
  Detection oligonucleotide for SEQ ID NO:48
tagggttatgtgttgg

SEQ ID NO: 1908 - DNA, 18 bp, Artificial Sequence
  Detection oligonucleotide for SEQ ID NO:48
aacgaatttttcgatatt

SEQ ID NO: 1909 - DNA, 21 bp, Artificial Sequence
  Detection oligonucleotide for SEQ ID NO:48
tttaatgaattttttgatatt

SEQ ID NO: 1910 - DNA, 16 bp, Artificial Sequence
  Detection oligonucleotide for SEQ ID NO:48
aaaatcgtatgcgtgt

SEQ ID NO: 1911 - DNA, 18 bp, Artificial Sequence
  Detection oligonucleotide for SEQ ID NO:48
gaaaattgtatgtgtgtg

SEQ ID NO: 1912 - DNA, 16 bp, Artificial Sequence
  Detection oligonucleotide for SEQ ID NO:9
gtttcgcgtttaggga

SEQ ID NO: 1913 - DNA, 17 bp, Artificial Sequence
  Detection oligonucleotide for SEQ ID NO:9
gttttgtgtttagggat

SEQ ID NO: 1914 - DNA, 16 bp, Artificial Sequence
  Detection oligonucleotide for SEQ ID NO:9
agtgttcgtcgtagtt

SEQ ID NO: 1915 - DNA, 17 bp, Artificial Sequence
  Detection oligonucleotide for SEQ ID NO:9
tgagtgtttgttgtagt

SEQ ID NO: 1916 - DNA, 16 bp, Artificial Sequence
  Detection oligonucleotide for SEQ ID NO:4
ttttgttcgcgttgaa

SEQ ID NO: 1917 - DNA, 17 bp, Artificial Sequence
  Detection oligonucleotide for SEQ ID NO:4
ttgtttgtgttgaagta

SEQ ID NO: 1918 - DNA, 16 bp, Artificial Sequence
  Detection oligonucleotide for SEQ ID NO:4
gggtcgcgaggtagtt

SEQ ID NO: 1919 - DNA, 16 bp, Artificial Sequence
  Detection oligonucleotide for SEQ ID NO:4
tgggttgtgaggtagt

SEQ ID NO: 1920 - DNA, 16 bp, Artificial Sequence
  Detection oligonucleotide for SEQ ID NO:4
tttgtgcgacgttatt

SEQ ID NO: 1921 - DNA, 17 bp, Artificial Sequence
  Detection oligonucleotide for SEQ ID NO:4
ggtttgtgtgatgttat

SEQ ID NO: 1922 - DNA, 16 bp, Artificial Sequence
  Detection oligonucleotide for SEQ ID NO:4
atggcggtttcgattt

SEQ ID NO: 1923 - DNA, 17 bp, Artificial Sequence
  Detection oligonucleotide for SEQ ID NO:4
gatggtggttttgattt

SEQ ID NO: 1924 - DNA, 16 bp, Artificial Sequence
  Detection oligonucleotide for SEQ ID NO:5
aatgagcgagaaagta

SEQ ID NO: 1925 - DNA, 17 bp, Artificial Sequence
  Detection oligonucleotide for SEQ ID NO:5
agaatgagtgagaaagt

SEQ ID NO: 1926 - DNA, 16 bp, Artificial Sequence
  Detection oligonucleotide for SEQ ID NO:5
attaaacgggatggtt

SEQ ID NO: 1927 - DNA, 18 bp, Artificial Sequence
  Detection oligonucleotide for SEQ ID NO:5
aatattaaatgggatggt

SEQ ID NO: 1928 - DNA, 16 bp, Artificial Sequence
  Detection oligonucleotide for SEQ ID NO:5
gagttgcgaggatttt

SEQ ID NO: 1929 - DNA, 16 bp, Artificial Sequence
  Detection oligonucleotide for SEQ ID NO:5
ggagttgtgaggattt

SEQ ID NO: 1930 - DNA, 16 bp, Artificial Sequence
  Detection oligonucleotide for SEQ ID NO:5
gggaatcgttgatttt

SEQ ID NO: 1931 - DNA, 16 bp, Artificial Sequence
  Detection oligonucleotide for SEQ ID NO:5
aggggaattgttgatt

SEQ ID NO: 1932 - DNA, 16 bp, Artificial Sequence
  Detection oligonucleotide for SEQ ID NO:7
tagtcgtcgtgtagga

SEQ ID NO: 1933 - DNA, 17 bp, Artificial Sequence
  Detection oligonucleotide for SEQ ID NO:7
taggtagttgttgtgta

SEQ ID NO: 1934 - DNA, 16 bp, Artificial Sequence
  Detection oligonucleotide for SEQ ID NO:7
tataggtacgcgatga

SEQ ID NO: 1935 - DNA, 16 bp, Artificial Sequence
  Detection oligonucleotide for SEQ ID NO:7
aggtatgtgatgagga

SEQ ID NO: 1936 - DNA, 16 bp, Artificial Sequence
  Detection oligonucleotide for SEQ ID NO:7
tatggttacgtacgag

SEQ ID NO: 1937 - DNA, 18 bp, Artificial Sequence
  Detection oligonucleotide for SEQ ID NO:7
atggttatgtatgagttt

SEQ ID NO: 1938 - DNA, 16 bp, Artificial Sequence
  Detection oligonucleotide for SEQ ID NO:7
atgatttgcgttacgt

SEQ ID NO: 1939 - DNA, 18 bp, Artificial Sequence
  Detection oligonucleotide for SEQ ID NO:7
atgatttgtgttatgttt

SEQ ID NO: 1940 - DNA, 17 bp, Artificial Sequence
  Detection oligonucleotide for SEQ ID NO:7
taacgttgtggttcgaa

SEQ ID NO: 1941 - DNA, 17 bp, Artificial Sequence
  Detection oligonucleotide for SEQ ID NO:7
taatgttgtggtttgaa

SEQ ID NO: 1942 - DNA, 17 bp, Artificial Sequence
  Detection oligonucleotide for SEQ ID NO:1
ggtcggcgttgatttta

SEQ ID NO: 1943 - DNA, 17 bp, Artificial Sequence
  Detection oligonucleotide for SEQ ID NO:1
ggttggtgttgatttta

SEQ ID NO: 1944 - DNA, 16 bp, Artificial Sequence
  Detection oligonucleotide for SEQ ID NO:1
gattcgaacggatttt

SEQ ID NO: 1945 - DNA, 17 bp, Artificial Sequence
  Detection oligonucleotide for SEQ ID NO:1
gggatttgaatggattt

SEQ ID NO: 1946 - DNA, 16 bp, Artificial Sequence
  Detection oligonucleotide for SEQ ID NO:1
tgggtcgggattcgaa

SEQ ID NO: 1947 - DNA, 16 bp, Artificial Sequence
  Detection oligonucleotide for SEQ ID NO:1
tgggttgggatttgaa

SEQ ID NO: 1948 - DNA, 16 bp, Artificial Sequence
  Detection oligonucleotide for SEQ ID NO:1
gtcggaagtttcggga

SEQ ID NO: 1949 - DNA, 17 bp, Artificial Sequence
  Detection oligonucleotide for SEQ ID NO:1
gttggaagttttgggat

SEQ ID NO: 1950 - DNA, 16 bp, Artificial Sequence
  Detection oligonucleotide for SEQ ID NO:1
tggatatcgtagggta

SEQ ID NO: 1951 - DNA, 17 bp, Artificial Sequence
  Detection oligonucleotide for SEQ ID NO:1
tggatattgtagggtag

SEQ ID NO: 1952 - DNA, 16 bp, Artificial Sequence
  Detection oligonucleotide for PROSTAGLANDIN E2 RECEPTOR, EP4 SUBTYPE (PROSTANOID EP4 RECEPTOR) (PGE RECEPTOR, EP4 SUBTYPE)
aggtaatcgaggcggt

SEQ ID NO: 1953 - DNA, 16 bp, Artificial Sequence
  Detection oligonucleotide for PROSTAGLANDIN E2 RECEPTOR, EP4 SUBTYPE (PROSTANOID EP4 RECEPTOR) (PGE RECEPTOR, EP4 SUBTYPE)
aggtaattgaggtggt

SEQ ID NO: 1954 - DNA, 16 bp, Artificial Sequence
  Detection oligonucleotide for PROSTAGLANDIN E2 RECEPTOR, EP4 SUBTYPE (PROSTANOID EP4 RECEPTOR) (PGE RECEPTOR, EP4 SUBTYPE)
ggcgtcgaaagtcgtt

SEQ ID NO: 1955 - DNA, 17 bp, Artificial Sequence
  Detection oligonucleotide for PROSTAGLANDIN E2 RECEPTOR, EP4 SUBTYPE (PROSTANOID EP4 RECEPTOR) (PGE RECEPTOR, EP4 SUBTYPE)
ggtgttgaaagttgttg

SEQ ID NO: 1956 - DNA, 17 bp, Artificial Sequence
  Detection oligonucleotide for PROSTAGLANDIN E2 RECEPTOR, EP4 SUBTYPE (PROSTANOID EP4 RECEPTOR) (PGE RECEPTOR, EP4 SUBTYPE)
taatcgtttgtttacgt

SEQ ID NO: 1957 - DNA, 19 bp, Artificial Sequence
  Detection oligonucleotide for PROSTAGLANDIN E2 RECEPTOR, EP4 SUBTYPE (PROSTANOID EP4 RECEPTOR) (PGE RECEPTOR, EP4 SUBTYPE)
aattgtttgtttatgtagt

SEQ ID NO: 1958 - DNA, 16 bp, Artificial Sequence
  Detection oligonucleotide for ORPHAN NUCLEAR RECEPTOR NR5A2 (ALPHA-1-FETOPROTEIN TRANSCRIPTION FACTOR) (HEPATOCYTIC TRANSCRIPTION FACTOR) (B1-BINDING FACTOR) (HB1F) (CYP7A PROMOTER BINDING FACTOR)
ttacggaggcgtttta

SEQ ID NO: 1959 - DNA, 17 bp, Artificial Sequence
  Detection oligonucleotide for ORPHAN NUCLEAR RECEPTOR NR5A2 (ALPHA-1-FETOPROTEIN TRANSCRIPTION FACTOR) (HEPATOCYTIC TRANSCRIPTION FACTOR) (B1-BINDING FACTOR) (HB1F) (CYP7A PROMOTER BINDING FACTOR)
ttttatggaggtgtttt

SEQ ID NO: 1960 - DNA, 16 bp, Artificial Sequence
  Detection oligonucleotide for ORPHAN NUCLEAR RECEPTOR NR5A2 (ALPHA-1-FETOPROTEIN TRANSCRIPTION FACTOR) (HEPATOCYTIC TRANSCRIPTION FACTOR) (B1-BINDING FACTOR) (HB1F) (CYP7A PROMOTER BINDING FACTOR)
aggcgaatttatcggg

SEQ ID NO: 1961 - DNA, 16 bp, Artificial Sequence
  Detection oligonucleotide for ORPHAN NUCLEAR RECEPTOR NR5A2 (ALPHA-1-FETOPROTEIN TRANSCRIPTION FACTOR) (HEPATOCYTIC TRANSCRIPTION FACTOR) (B1-BINDING FACTOR) (HB1F) (CYP7A PROMOTER BINDING FACTOR)
ggtgaatttattgggg

SEQ ID NO: 1962 - DNA, 16 bp, Artificial Sequence
  Detection oligonucleotide for ORPHAN NUCLEAR RECEPTOR NR5A2 (ALPHA-1-FETOPROTEIN TRANSCRIPTION FACTOR) (HEPATOCYTIC TRANSCRIPTION FACTOR) (B1-BINDING FACTOR) (HB1F) (CYP7A PROMOTER BINDING FACTOR)
tagtcgaagtaggcgt

SEQ ID NO: 1963 - DNA, 17 bp, Artificial Sequence
  Detection oligonucleotide for ORPHAN NUCLEAR RECEPTOR NR5A2 (ALPHA-1-FETOPROTEIN TRANSCRIPTION FACTOR) (HEPATOCYTIC TRANSCRIPTION FACTOR) (B1-BINDING FACTOR) (HB1F) (CYP7A PROMOTER BINDING FACTOR)
tagttgaagtaggtgtt

SEQ ID NO: 1964 - DNA, 16 bp, Artificial Sequence
  Detection oligonucleotide for ORPHAN NUCLEAR RECEPTOR NR5A2 (ALPHA-1-FETOPROTEIN TRANSCRIPTION FACTOR) (HEPATOCYTIC TRANSCRIPTION FACTOR) (B1-BINDING FACTOR) (HB1F) (CYP7A PROMOTER BINDING FACTOR)
ttttcgacgaagtttt

SEQ ID NO: 1965 - DNA, 18 bp, Artificial Sequence
  Detection oligonucleotide for ORPHAN NUCLEAR RECEPTOR NR5A2 (ALPHA-1-FETOPROTEIN TRANSCRIPTION FACTOR) (HEPATOCYTIC TRANSCRIPTION FACTOR) (B1-BINDING FACTOR) (HB1F) (CYP7A PROMOTER BINDING FACTOR)
ttttgatgaagttttgtt

SEQ ID NO: 1966 - DNA, 16 bp, Artificial Sequence
  Detection oligonucleotide for LIM DOMAIN KINASE 1 (EC 2.7.1.37) (LIMK-1)
tgtagtcgggaggtta

SEQ ID NO: 1967 - DNA, 16 bp, Artificial Sequence
  Detection oligonucleotide for LIM DOMAIN KINASE 1 (EC 2.7.1.37) (LIMK-1)
tgtagttgggaggtta

SEQ ID NO: 1968 - DNA, 16 bp, Artificial Sequence
  Detection oligonucleotide for LIM DOMAIN KINASE 1 (EC 2.7.1.37) (LIMK-1)
ggattatcgcgggggt

SEQ ID NO: 1969 - DNA, 16 bp, Artificial Sequence
  Detection oligonucleotide for LIM DOMAIN KINASE 1 (EC 2.7.1.37) (LIMK-1)
ggattattgtgggggt

SEQ ID NO: 1970 - DNA, 18 bp, Artificial Sequence
  Detection oligonucleotide for LIM DOMAIN KINASE 1 (EC 2.7.1.37) (LIMK-1)
gtcggtagtttatcggat

SEQ ID NO: 1971 - DNA, 18 bp, Artificial Sequence
  Detection oligonucleotide for LIM DOMAIN KINASE 1 (EC 2.7.1.37) (LIMK-1)
gttggtagtttattggat

SEQ ID NO: 1972 - DNA, 16 bp, Artificial Sequence
  Detection oligonucleotide for LIM DOMAIN KINASE 1 (EC 2.7.1.37) (LIMK-1)
taggagacgttacgtt

SEQ ID NO: 1973 - DNA, 17 bp, Artificial Sequence
  Detection oligonucleotide for LIM DOMAIN KINASE 1 (EC 2.7.1.37) (LIMK-1)
agatgttatgttagggt

SEQ ID NO: 1974 - DNA, 16 bp, Artificial Sequence
  Detection oligonucleotide for BCL11B
taggtttcgattcgtt

SEQ ID NO: 1975 - DNA, 18 bp, Artificial Sequence
  Detection oligonucleotide for BCL11B
ttaggttttgatttgttt

SEQ ID NO: 1976 - DNA, 16 bp, Artificial Sequence
  Detection oligonucleotide for BCL11B
aagtcgtcggagttag

SEQ ID NO: 1977 - DNA, 16 bp, Artificial Sequence
  Detection oligonucleotide for BCL11B
gtgaagttgttggagt

SEQ ID NO: 1978 - DNA, 16 bp, Artificial Sequence
  Detection oligonucleotide for BCL11B
ttgaggcgttacggtt

SEQ ID NO: 1979 - DNA, 16 bp, Artificial Sequence
  Detection oligonucleotide for BCL11B
ttgaggtgttatggtt

SEQ ID NO: 1980 - DNA, 16 bp, Artificial Sequence
  Detection oligonucleotide for MSF
gtttcgaaattggcgt

SEQ ID NO: 1981 - DNA, 16 bp, Artificial Sequence
  Detection oligonucleotide for MSF
tttgaaattggtgtgg

SEQ ID NO: 1982 - DNA, 18 bp, Artificial Sequence
  Detection oligonucleotide for MSF
ttcggtttacgggttgta

SEQ ID NO: 1983 - DNA, 18 bp, Artificial Sequence
  Detection oligonucleotide for MSF
tttggtttatgggttgta

SEQ ID NO: 1984 - DNA, 16 bp, Artificial Sequence
  Detection oligonucleotide for MSF
ttacggttcgattttg

SEQ ID NO: 1985 - DNA, 17 bp, Artificial Sequence
  Detection oligonucleotide for MSF
tatggtttgattttggg

SEQ ID NO: 1986 - DNA, 16 bp, Artificial Sequence
  Detection oligonucleotide for SEQ ID NO:14
taaggcgttttcgata

SEQ ID NO: 1987 - DNA, 18 bp, Artificial Sequence
  Detection oligonucleotide for SEQ ID NO:14
gtaaggtgtttttgatat

SEQ ID NO: 1988 - DNA, 16 bp, Artificial Sequence
  Detection oligonucleotide for SEQ ID NO:14
tgggtgtacgcgtgaa

SEQ ID NO: 1989 - DNA, 16 bp, Artificial Sequence
  Detection oligonucleotide for SEQ ID NO:14
tgtatgtgtgaagggg

SEQ ID NO: 1990 - DNA, 16 bp, Artificial Sequence
  Detection oligonucleotide for SEQ ID NO:16
atcgttggtcggattt

SEQ ID NO: 1991 - DNA, 17 bp, Artificial Sequence
  Detection oligonucleotide for SEQ ID NO:16
taggattgttggttgga

SEQ ID NO: 1992 - DNA, 17 bp, Artificial Sequence
  Detection oligonucleotide for SEQ ID NO:16
aggagttttcgtgtcgt

SEQ ID NO: 1993 - DNA, 17 bp, Artificial Sequence
  Detection oligonucleotide for SEQ ID NO:16
aggagtttttgtgttgt

SEQ ID NO: 1994 - DNA, 16 bp, Artificial Sequence
  Detection oligonucleotide for SEQ ID NO:16
ttacggatagggcgat

SEQ ID NO: 1995 - DNA, 17 bp, Artificial Sequence
  Detection oligonucleotide for SEQ ID NO:16
tatggatagggtgattt

SEQ ID NO: 1996 - DNA, 16 bp, Artificial Sequence
  Detection oligonucleotide for SEQ ID NO:16
aggcgttgtcggtgat

SEQ ID NO: 1997 - DNA, 17 bp, Artificial Sequence
  Detection oligonucleotide for SEQ ID NO:16
aggtgttgttggtgata

SEQ ID NO: 1998 - DNA, 18 bp, Artificial Sequence
  Detection oligonucleotide for SEQ ID NO:17
tacgtttcgggtttgtta

SEQ ID NO: 1999 - DNA, 18 bp, Artificial Sequence
  Detection oligonucleotide for SEQ ID NO:17
tatgttttgggtttgtta

SEQ ID NO: 2000 - DNA, 16 bp, Artificial Sequence
  Detection oligonucleotide for SEQ ID NO:17
atttagtcgtgcgttt

SEQ ID NO: 2001 - DNA, 17 bp, Artificial Sequence
  Detection oligonucleotide for SEQ ID NO:17
tgatttagttgtgtgtt

SEQ ID NO: 2002 - DNA, 16 bp, Artificial Sequence
  Detection oligonucleotide for SEQ ID NO:18
tttacgcggggtttta

SEQ ID NO: 2003 - DNA, 17 bp, Artificial Sequence
  Detection oligonucleotide for SEQ ID NO:18
tttatgtggggttttag

SEQ ID NO: 2004 - DNA, 17 bp, Artificial Sequence
  Detection oligonucleotide for SEQ ID NO:18
ttacgtcgttattaggt

SEQ ID NO: 2005 - DNA, 19 bp, Artificial Sequence
  Detection oligonucleotide for SEQ ID NO:18
ttttatgttgttattaggt

SEQ ID NO: 2006 - DNA, 16 bp, Artificial Sequence
  Detection oligonucleotide for SEQ ID NO:18
tatttggacgtcgggt

SEQ ID NO: 2007 - DNA, 16 bp, Artificial Sequence
  Detection oligonucleotide for SEQ ID NO:18
tatttggatgttgggt

SEQ ID NO: 2008 - DNA, 17 bp, Artificial Sequence
  Detection oligonucleotide for SEQ ID NO:18
gaggcgtattaggtcgg

SEQ ID NO: 2009 - DNA, 17 bp, Artificial Sequence
  Detection oligonucleotide for SEQ ID NO:18
aggtgtattaggttggg

SEQ ID NO: 2010 - DNA, 16 bp, Artificial Sequence
  Detection oligonucleotide for SEQ ID NO:18
aaagcggagtcgttag

SEQ ID NO: 2011 - DNA, 16 bp, Artificial Sequence
  Detection oligonucleotide for SEQ ID NO:18
agtggagttgttaggt

SEQ ID NO: 2012 - DNA, 17 bp, Artificial Sequence
  Detection oligonucleotide for SEQ ID NO:19
aggttttcgttgtagta

SEQ ID NO: 2013 - DNA, 18 bp, Artificial Sequence
  Detection oligonucleotide for SEQ ID NO:19
taggtttttgttgtagta

SEQ ID NO: 2014 - DNA, 18 bp, Artificial Sequence
  Detection oligonucleotide for SEQ ID NO:19
tgagattcgttttttaaa

SEQ ID NO: 2015 - DNA, 18 bp, Artificial Sequence
  Detection oligonucleotide for SEQ ID NO:19
ggtgagatttgtttttta

SEQ ID NO: 2016 - DNA, 17 bp, Artificial Sequence
  Detection oligonucleotide for PRDM6
agttttaagcgtttggt

SEQ ID NO: 2017 - DNA, 17 bp, Artificial Sequence
  Detection oligonucleotide for PRDM6
agttttaagtgtttggt

SEQ ID NO: 2018 - DNA, 16 bp, Artificial Sequence
  Detection oligonucleotide for PRDM6
gaagttcggatttcgg

SEQ ID NO: 2019 - DNA, 17 bp, Artificial Sequence
  Detection oligonucleotide for PRDM6
ggaagtttggattttgg

SEQ ID NO: 2020 - DNA, 16 bp, Artificial Sequence
  Detection oligonucleotide for PRDM6
ttgtcgggttacggga

SEQ ID NO: 2021 - DNA, 16 bp, Artificial Sequence
  Detection oligonucleotide for PRDM6
gttgggttatgggaga

SEQ ID NO: 2022 - DNA, 18 bp, Artificial Sequence
  Detection oligonucleotide for PRDM6
ttcgtagaattgtcgaag

SEQ ID NO: 2023 - DNA, 18 bp, Artificial Sequence
  Detection oligonucleotide for PRDM6
tttgtagaattgttgaag

SEQ ID NO: 2024 - DNA, 16 bp, Artificial Sequence
  Detection oligonucleotide for RAP2B
ggtcgggtaatcgtta

SEQ ID NO: 2025 - DNA, 17 bp, Artificial Sequence
  Detection oligonucleotide for RAP2B
gttgggtaattgttaga

SEQ ID NO: 2026 - DNA, 16 bp, Artificial Sequence
  Detection oligonucleotide for RAP2B
aggaagcgttttcgtt

SEQ ID NO: 2027 - DNA, 17 bp, Artificial Sequence
  Detection oligonucleotide for RAP2B
agaggaagtgtttttgt

SEQ ID NO: 2028 - DNA, 16 bp, Artificial Sequence
  Detection oligonucleotide for NR2E1
aatgtagcggcgttat

SEQ ID NO: 2029 - DNA, 18 bp, Artificial Sequence
  Detection oligonucleotide for NR2E1
taaatgtagtggtgttat

SEQ ID NO: 2030 - DNA, 17 bp, Artificial Sequence
  Detection oligonucleotide for NR2E1
gtcgttatcggtttgga

SEQ ID NO: 2031 - DNA, 17 bp, Artificial Sequence
  Detection oligonucleotide for NR2E1
gttgttattggtttgga

SEQ ID NO: 2032 - DNA, 16 bp, Artificial Sequence
  Detection oligonucleotide for NR2E1
gacgtaagtttcgggt

SEQ ID NO: 2033 - DNA, 16 bp, Artificial Sequence
  Detection oligonucleotide for NR2E1
ggatgtaagttttggg

SEQ ID NO: 2034 - DNA, 16 bp, Artificial Sequence
  Detection oligonucleotide for NR2E1
tttttagtcgcgagaa

SEQ ID NO: 2035 - DNA, 18 bp, Artificial Sequence
  Detection oligonucleotide for NR2E1
tttttagttgtgagaagt

SEQ ID NO: 2036 - DNA, 17 bp, Artificial Sequence
  Detection oligonucleotide for NR2E1
ttcgggtgatatcgttt

SEQ ID NO: 2037 - DNA, 17 bp, Artificial Sequence
  Detection oligonucleotide for NR2E1
tttgggtgatattgttt

SEQ ID NO: 2038 - DNA, 16 bp, Artificial Sequence
  Detection oligonucleotide for NR2E1
aggcgagtcggagttt

SEQ ID NO: 2039 - DNA, 17 bp, Artificial Sequence
  Detection oligonucleotide for NR2E1
aggtgagttggagtttt

SEQ ID NO: 2040 - DNA, 16 bp, Artificial Sequence
  Detection oligonucleotide for NR2E1
taagtcgagcgagttt

SEQ ID NO: 2041 - DNA, 17 bp, Artificial Sequence
  Detection oligonucleotide for NR2E1
tagtaagttgagtgagt

SEQ ID NO: 2042 - DNA, 16 bp, Artificial Sequence
  Detection oligonucleotide for NR2E1
agggacgcgaaaattt

SEQ ID NO: 2043 - DNA, 16 bp, Artificial Sequence
  Detection oligonucleotide for NR2E1
ggagggatgtgaaaat

SEQ ID NO: 2044 - DNA, 16 bp, Artificial Sequence
  Detection oligonucleotide for PCDH7
atcgtagtcggtttta

SEQ ID NO: 2045 - DNA, 18 bp, Artificial Sequence
  Detection oligonucleotide for PCDH7
gattattgtagttggttt

SEQ ID NO: 2046 - DNA, 16 bp, Artificial Sequence
  Detection oligonucleotide for RTTN
tagtggcgcggtagtt

SEQ ID NO: 2047 - DNA, 17 bp, Artificial Sequence
  Detection oligonucleotide for RTTN
tagtggtgtggtagttt

SEQ ID NO: 2048 - DNA, 16 bp, Artificial Sequence
  Detection oligonucleotide for RTTN
taggacgtgttttcgg

SEQ ID NO: 2049 - DNA, 16 bp, Artificial Sequence
  Detection oligonucleotide for RTTN
aggatgtgtttttggg

SEQ ID NO: 2050 - DNA, 21 bp, Artificial Sequence
  Detection oligonucleotide for SNAP25
tatttcgagttagagttacga

SEQ ID NO: 2051 - DNA, 21 bp, Artificial Sequence
  Detection oligonucleotide for SNAP25
tattttgagttagagttatga

SEQ ID NO: 2052 - DNA, 18 bp, Artificial Sequence
  Detection oligonucleotide for SNAP25
atacggaatatcgtattt

SEQ ID NO: 2053 - DNA, 20 bp, Artificial Sequence
  Detection oligonucleotide for SNAP25
gtgtatatatggaatattgt

SEQ ID NO: 2054 - DNA, 16 bp, Artificial Sequence
  Detection oligonucleotide for SEQ ID NO:26
ttaagtatcgaggcgt

SEQ ID NO: 2055 - DNA, 18 bp, Artificial Sequence
  Detection oligonucleotide for SEQ ID NO:26
ttttaagtattgaggtgt

SEQ ID NO: 2056 - DNA, 17 bp, Artificial Sequence
  Detection oligonucleotide for SEQ ID NO:26
aattttggtcgtttagt

SEQ ID NO: 2057 - DNA, 18 bp, Artificial Sequence
  Detection oligonucleotide for SEQ ID NO:26
aaattttggttgtttagt

SEQ ID NO: 2058 - DNA, 17 bp, Artificial Sequence
  Detection oligonucleotide for SEQ ID NO:26
ttcgtattgacgttaat

SEQ ID NO: 2059 - DNA, 20 bp, Artificial Sequence
  Detection oligonucleotide for SEQ ID NO:26
tttgtattgatgttaataga

SEQ ID NO: 2060 - DNA, 16 bp, Artificial Sequence
  Detection oligonucleotide for GIRK2
agttgttcgtaggcga

SEQ ID NO: 2061 - DNA, 16 bp, Artificial Sequence
  Detection oligonucleotide for GIRK2
agttgtttgtaggtga

SEQ ID NO: 2062 - DNA, 17 bp, Artificial Sequence
  Detection oligonucleotide for GIRK2
ttatttcgttcgtagtt

SEQ ID NO: 2063 - DNA, 18 bp, Artificial Sequence
  Detection oligonucleotide for GIRK2
tttgtttgtagttaggta

SEQ ID NO: 2064 - DNA, 16 bp, Artificial Sequence
  Detection oligonucleotide for GIRK2
ttagtcgaaaggcgag

SEQ ID NO: 2065 - DNA, 16 bp, Artificial Sequence
  Detection oligonucleotide for GIRK2
tagttgaaaggtgagg

SEQ ID NO: 2066 - DNA, 16 bp, Artificial Sequence
  Detection oligonucleotide for SEQ ID NO:28
attaggcgagtttcgt

SEQ ID NO: 2067 - DNA, 17 bp, Artificial Sequence
  Detection oligonucleotide for SEQ ID NO:28
ttaggtgagttttgttt

SEQ ID NO: 2068 - DNA, 16 bp, Artificial Sequence
  Detection oligonucleotide for SEQ ID NO:31
tttacgtagggcgatt

SEQ ID NO: 2069 - DNA, 18 bp, Artificial Sequence
  Detection oligonucleotide for SEQ ID NO:31
atttttatgtagggtgat

SEQ ID NO: 2070 - DNA, 16 bp, Artificial Sequence
  Detection oligonucleotide for SEQ ID NO:31
gatacggttaggcggg

SEQ ID NO: 2071 - DNA, 16 bp, Artificial Sequence
  Detection oligonucleotide for SEQ ID NO:31
gatatggttaggtggg

SEQ ID NO: 2072 - DNA, 16 bp, Artificial Sequence
  Detection oligonucleotide for SEQ ID NO:31
ttcgggcgttttatat

SEQ ID NO: 2073 - DNA, 17 bp, Artificial Sequence
  Detection oligonucleotide for SEQ ID NO:31
ggtttgggtgttttata

SEQ ID NO: 2074 - DNA, 18 bp, Artificial Sequence
  Detection oligonucleotide for HOXB13
gtcgttattatttcgagg

SEQ ID NO: 2075 - DNA, 19 bp, Artificial Sequence
  Detection oligonucleotide for HOXB13
gttgttattattttgagga

SEQ ID NO: 2076 - DNA, 16 bp, Artificial Sequence
  Detection oligonucleotide for HOXB13
aagttagcgggttcgt

SEQ ID NO: 2077 - DNA, 16 bp, Artificial Sequence
  Detection oligonucleotide for HOXB13
aagttagtgggtttgt

SEQ ID NO: 2078 - DNA, 16 bp, Artificial Sequence
  Detection oligonucleotide for HOXB13
ttggtcgcgtagtaaa

SEQ ID NO: 2079 - DNA, 17 bp, Artificial Sequence
  Detection oligonucleotide for HOXB13
tggttgtgtagtaaagt

SEQ ID NO: 2080 - DNA, 16 bp, Artificial Sequence
  Detection oligonucleotide for SEQ ID NO:35
ggaggtgcgaatttaa

SEQ ID NO: 2081 - DNA, 16 bp, Artificial Sequence
  Detection oligonucleotide for SEQ ID NO:35
gggaggtgtgaattta

SEQ ID NO: 2082 - DNA, 16 bp, Artificial Sequence
  Detection oligonucleotide for SEQ ID NO:35
aaatagtcgtttggga

SEQ ID NO: 2083 - DNA, 17 bp, Artificial Sequence
  Detection oligonucleotide for SEQ ID NO:35
aaatagttgtttgggag

SEQ ID NO: 2084 - DNA, 20 bp, Artificial Sequence
  Detection oligonucleotide for SEQ ID NO:35
agaaaatatacgagatttat

SEQ ID NO: 2085 - DNA, 21 bp, Artificial Sequence
  Detection oligonucleotide for SEQ ID NO:35
agaaaatatatgagatttatt

SEQ ID NO: 2086 - DNA, 16 bp, Artificial Sequence
  Detection oligonucleotide for SEQ ID NO:35
taaagacgggaagaga

SEQ ID NO: 2087 - DNA, 17 bp, Artificial Sequence
  Detection oligonucleotide for SEQ ID NO:35
ataaagatgggaagaga

SEQ ID NO: 2088 - DNA, 17 bp, Artificial Sequence
  Detection oligonucleotide for MGC10561
ttttttacgttaagggg

SEQ ID NO: 2089 - DNA, 17 bp, Artificial Sequence
  Detection oligonucleotide for MGC10561
tttttatgttaaggggg

SEQ ID NO: 2090 - DNA, 17 bp, Artificial Sequence
  Detection oligonucleotide for MGC10561
tttgtttttcgagtaga

SEQ ID NO: 2091 - DNA, 17 bp, Artificial Sequence
  Detection oligonucleotide for MGC10561
tgttttttgagtagagg

SEQ ID NO: 2092 - DNA, 16 bp, Artificial Sequence
  Detection oligonucleotide for LMX1A
gtcgggtttttcggaa

SEQ ID NO: 2093 - DNA, 17 bp, Artificial Sequence
  Detection oligonucleotide for LMX1A
gttgggttttttggaag

SEQ ID NO: 2094 - DNA, 18 bp, Artificial Sequence
  Detection oligonucleotide for LMX1A
gtcgagattttatcgaaa

SEQ ID NO: 2095 - DNA, 19 bp, Artificial Sequence
  Detection oligonucleotide for LMX1A
gttgagattttattgaaag

SEQ ID NO: 2096 - DNA, 16 bp, Artificial Sequence
  Detection oligonucleotide for LMX1A
agtattcgggcgggta

SEQ ID NO: 2097 - DNA, 16 bp, Artificial Sequence
  Detection oligonucleotide for LMX1A
gtagtatttgggtggg

SEQ ID NO: 2098 - DNA, 17 bp, Artificial Sequence
  Detection oligonucleotide for LMX1A
aacgaaattacgtgtat

SEQ ID NO: 2099 - DNA, 19 bp, Artificial Sequence
  Detection oligonucleotide for LMX1A
tgaaatgaaattatgtgta

SEQ ID NO: 2100 - DNA, 16 bp, Artificial Sequence
  Detection oligonucleotide for GS1
tgcgagttagcggtta

SEQ ID NO: 2101 - DNA, 16 bp, Artificial Sequence
  Detection oligonucleotide for GS1
ttgtgagttagtggtt

SEQ ID NO: 2102 - DNA, 17 bp, Artificial Sequence
  Detection oligonucleotide for GS1
agtttcgaggttttcgg

SEQ ID NO: 2103 - DNA, 18 bp, Artificial Sequence
  Detection oligonucleotide for GS1
aagttttgaggtttttgg

SEQ ID NO: 2104 - DNA, 16 bp, Artificial Sequence
  Detection oligonucleotide for TITF1
gtcgtggggatcgtat

SEQ ID NO: 2105 - DNA, 16 bp, Artificial Sequence
  Detection oligonucleotide for TITF1
gttgtggggattgtat

SEQ ID NO: 2106 - DNA, 17 bp, Artificial Sequence
  Detection oligonucleotide for TITF1
ggttcgtttaagttcgg

SEQ ID NO: 2107 - DNA, 17 bp, Artificial Sequence
  Detection oligonucleotide for TITF1
ggtttgtttaagtttgg

SEQ ID NO: 2108 - DNA, 16 bp, Artificial Sequence
  Detection oligonucleotide for TITF1
ttaggtcgcgtttgta

SEQ ID NO: 2109 - DNA, 16 bp, Artificial Sequence
  Detection oligonucleotide for TITF1
aggttgtgtttgtaga

SEQ ID NO: 2110 - DNA, 18 bp, Artificial Sequence
  Detection oligonucleotide for TITF1
tatttcgttttcgtaatt

SEQ ID NO: 2111 - DNA, 20 bp, Artificial Sequence
  Detection oligonucleotide for TITF1
tttgtttttgtaattagatt

SEQ ID NO: 2112 - DNA, 16 bp, Artificial Sequence
  Detection oligonucleotide for DDX51
agattttcggcgagat

SEQ ID NO: 2113 - DNA, 17 bp, Artificial Sequence
  Detection oligonucleotide for DDX51
atttttggtgagatagg

SEQ ID NO: 2114 - DNA, 18 bp, Artificial Sequence
  Detection oligonucleotide for DDX51
tacgtgtggttttcggta

SEQ ID NO: 2115 - DNA, 18 bp, Artificial Sequence
  Detection oligonucleotide for DDX51
tatgtgtggtttttggta

SEQ ID NO: 2116 - DNA, 16 bp, Artificial Sequence
  Detection oligonucleotide for DDX51
aacgtgcggggttttt

SEQ ID NO: 2117 - DNA, 16 bp, Artificial Sequence
  Detection oligonucleotide for DDX51
tgaatgtgtggggttt

SEQ ID NO: 2118 - DNA, 16 bp, Artificial Sequence
  Detection oligonucleotide for SEQ ID NO:45
agcgaacgtttatttt

SEQ ID NO: 2119 - DNA, 17 bp, Artificial Sequence
  Detection oligonucleotide for SEQ ID NO:45
taggagagtgaatgttt

SEQ ID NO: 2120 - DNA, 16 bp, Artificial Sequence
  Detection oligonucleotide for SEQ ID NO:46
gagtcgggttatcgtt

SEQ ID NO: 2121 - DNA, 16 bp, Artificial Sequence
  Detection oligonucleotide for SEQ ID NO:46
ggagttgggttattgt

SEQ ID NO: 2122 - DNA, 16 bp, Artificial Sequence
  Detection oligonucleotide for SEQ ID NO:46
ttacggatgtttcggt

SEQ ID NO: 2123 - DNA, 17 bp, Artificial Sequence
  Detection oligonucleotide for SEQ ID NO:46
tttatggatgttttggt

SEQ ID NO: 2124 - DNA, 16 bp, Artificial Sequence
  Detection oligonucleotide for SEQ ID NO:46
tgacgtattttcggtt

SEQ ID NO: 2125 - DNA, 17 bp, Artificial Sequence
  Detection oligonucleotide for SEQ ID NO:46
ggtgatgtatttttggt

SEQ ID NO: 2126 - DNA, 16 bp, Artificial Sequence
  Detection oligonucleotide for SEQ ID NO:46
atagtcggaatcgttg

SEQ ID NO: 2127 - DNA, 17 bp, Artificial Sequence
  Detection oligonucleotide for SEQ ID NO:46
tagttggaattgttgtt

SEQ ID NO: 2128 - DNA, 17 bp, Artificial Sequence
  Detection oligonucleotide for SEQ ID NO:2
attgggtttcgcgtagg

SEQ ID NO: 2129 - DNA, 17 bp, Artificial Sequence
  Detection oligonucleotide for SEQ ID NO:2
attgggttttgtgtagg

SEQ ID NO: 2130 - DNA, 16 bp, Artificial Sequence
  Detection oligonucleotide for SEQ ID NO:2
tagtagtcggcgggag

SEQ ID NO: 2131 - DNA, 16 bp, Artificial Sequence
  Detection oligonucleotide for SEQ ID NO:2
tagtagttggtgggag

SEQ ID NO: 2132 - DNA, 16 bp, Artificial Sequence
  Detection oligonucleotide for SEQ ID NO:3
ttgcgttaattcggta

SEQ ID NO: 2133 - DNA, 18 bp, Artificial Sequence
  Detection oligonucleotide for SEQ ID NO:3
aatttgtgttaatttggt

SEQ ID NO: 2134 - DNA, 16 bp, Artificial Sequence
  Detection oligonucleotide for SEQ ID NO:3
agtcgggagagcgaaa

SEQ ID NO: 2135 - DNA, 16 bp, Artificial Sequence
  Detection oligonucleotide for SEQ ID NO:3
agttgggagagtgaaa

SEQ ID NO: 2136 - DNA, 16 bp, Artificial Sequence
  Detection oligonucleotide for SEQ ID NO:3
ggtcgaagagtcggga

SEQ ID NO: 2137 - DNA, 16 bp, Artificial Sequence
  Detection oligonucleotide for SEQ ID NO:3
ggttgaagagttggga

SEQ ID NO: 2138 - DNA, 16 bp, Artificial Sequence
  Detection oligonucleotide for SEQ ID NO:3
atgttagcgggtcgaa

SEQ ID NO: 2139 - DNA, 16 bp, Artificial Sequence
  Detection oligonucleotide for SEQ ID NO:3
atgttagtgggttgaa

SEQ ID NO: 2140 - DNA, 16 bp, Artificial Sequence
  Detection oligonucleotide for SCGB3A1
ggcgtagaaggcgttt

SEQ ID NO: 2141 - DNA, 16 bp, Artificial Sequence
  Detection oligonucleotide for SCGB3A1
ggtgtagaaggtgttt

SEQ ID NO: 2142 - DNA, 16 bp, Artificial Sequence
  Detection oligonucleotide for TERT
tataacgaacgtcgtt

SEQ ID NO: 2143 - DNA, 18 bp, Artificial Sequence
  Detection oligonucleotide for TERT
aggtataatgaatgttgt

SEQ ID NO: 2144 - DNA, 16 bp, Artificial Sequence
  Detection oligonucleotide for TGFBR2
aagacggttaggtcgg

SEQ ID NO: 2145 - DNA, 16 bp, Artificial Sequence
  Detection oligonucleotide for TGFBR2
aagatggttaggttgg

SEQ ID NO: 2146 - DNA, 16 bp, Artificial Sequence
  Detection oligonucleotide for ALX4
atatcgttcgggggaa

SEQ ID NO: 2147 - DNA, 16 bp, Artificial Sequence
  Detection oligonucleotide for NME1
agtcgagattgcgtta

SEQ ID NO: 2148 - DNA, 17 bp, Artificial Sequence
  Detection oligonucleotide for NME1
agttgagattgtgttag

SEQ ID NO: 2149 - DNA, 17 bp, Artificial Sequence
  Detection oligonucleotide for NME1
atcgtttgaattcggga

SEQ ID NO: 2150 - DNA, 17 bp, Artificial Sequence
  Detection oligonucleotide for NME1
attgtttgaatttggga

SEQ ID NO: 2151 - DNA, 17 bp, Artificial Sequence
  Detection oligonucleotide for NME1
ttttagtacgttggaaa

SEQ ID NO: 2152 - DNA, 18 bp, Artificial Sequence
  Detection oligonucleotide for NME1
ttagtatgttggaaagta

SEQ ID NO: 2153 - DNA, 16 bp, Artificial Sequence
  Detection oligonucleotide for SEQ ID NO:8
atagggcgggatttta

SEQ ID NO: 2154 - DNA, 16 bp, Artificial Sequence
  Detection oligonucleotide for SEQ ID NO:8
gatagggtgggatttt

SEQ ID NO: 2155 - DNA, 16 bp, Artificial Sequence
  Detection oligonucleotide for SEQ ID NO:29
ttcgaagcgtgtatta

SEQ ID NO: 2156 - DNA, 16 bp, Artificial Sequence
  Detection oligonucleotide for SEQ ID NO:29
gggtttgaagtgtgta

SEQ ID NO: 2157 - DNA, 16 bp, Artificial Sequence
  Detection oligonucleotide for SEQ ID NO:29
ttttcgcgtttgcgaa

SEQ ID NO: 2158 - DNA, 17 bp, Artificial Sequence
  Detection oligonucleotide for SEQ ID NO:29
tttgtgtttgtgaaagg

SEQ ID NO: 2159 - DNA, 17 bp, Artificial Sequence
  Detection oligonucleotide for SEQ ID NO:36
ttcgttggagatcgtaa

SEQ ID NO: 2160 - DNA, 17 bp, Artificial Sequence
  Detection oligonucleotide for SEQ ID NO:36
gtttgttggagattgta

SEQ ID NO: 2161 - DNA, 16 bp, Artificial Sequence
  Detection oligonucleotide for SEQ ID NO:36
ggacgttgcgattgta

SEQ ID NO: 2162 - DNA, 17 bp, Artificial Sequence
  Detection oligonucleotide for SEQ ID NO:36
gatgttgtgattgtagt

SEQ ID NO: 2163 - DNA, 16 bp, Artificial Sequence
  Detection oligonucleotide for SEQ ID NO:5
tatgaggtcgtattgg

SEQ ID NO: 2164 - DNA, 17 bp, Artificial Sequence
  Detection oligonucleotide for SEQ ID NO:5
tatgaggttgtattggt

SEQ ID NO: 2165 - DNA, 16 bp, Artificial Sequence
  Detection oligonucleotide for SEQ ID NO:19
tttgatatcgagggag

SEQ ID NO: 2166 - DNA, 17 bp, Artificial Sequence
  Detection oligonucleotide for SEQ ID NO:19
tttgatattgagggagg

SEQ ID NO: 2167 - DNA, 16 bp, Artificial Sequence
  Detection oligonucleotide for SEQ ID NO:19
ggtgtacggaggaaag

SEQ ID NO: 2168 - DNA, 16 bp, Artificial Sequence
  Detection oligonucleotide for SEQ ID NO:19
ggtgtatggaggaaag

SEQ ID NO: 2169 - DNA, 17 bp, Artificial Sequence
  Detection oligonucleotide for SNAP25
gttattattcggtacgt

SEQ ID NO: 2170 - DNA, 20 bp, Artificial Sequence
  Detection oligonucleotide for SNAP25
agttattatttggtatgtat

SEQ ID NO: 2171 - DNA, 19 bp, Artificial Sequence
  Detection oligonucleotide for MGC10561
atatttagcgtagttattt

SEQ ID NO: 2172 - DNA, 21 bp, Artificial Sequence
  Detection oligonucleotide for MGC10561
tagtatatttagtgtagttat

SEQ ID NO: 2173 - DNA, 16 bp, Artificial Sequence
  Detection oligonucleotide for DDX51
taggcgagcgttaggt

SEQ ID NO: 2174 - DNA, 16 bp, Artificial Sequence
  Detection oligonucleotide for DDX51
ggtgagtgttaggtta

SEQ ID NO: 2175 - DNA, 16 bp, Artificial Sequence
  Detection oligonucleotide for SEQ ID NO:45
tgtagtatcgggggag

SEQ ID NO: 2176 - DNA, 16 bp, Artificial Sequence
  Detection oligonucleotide for SEQ ID NO:45
tgtagtattgggggag

SEQ ID NO: 2177 - DNA, 16 bp, Artificial Sequence
  Detection oligonucleotide for MGC34831
gtcggacggatttata

SEQ ID NO: 2178 - DNA, 17 bp, Artificial Sequence
  Detection oligonucleotide for MGC34831
tggttggatggatttat

SEQ ID NO: 2179 - DNA, 16 bp, Artificial Sequence
  Detection oligonucleotide for SEQ ID NO:42
aggtcgaataaagcgt

SEQ ID NO: 2180 - DNA, 17 bp, Artificial Sequence
  Detection oligonucleotide for SEQ ID NO:42
gaggttgaataaagtgt

SEQ ID NO: 2181 - DNA, 16 bp, Artificial Sequence
  Detection oligonucleotide for SCGB3A1
tattggcgtcgaggtt

SEQ ID NO: 2182 - DNA, 16 bp, Artificial Sequence
  Detection oligonucleotide for SCGB3A1
tattggtgttgaggtt

SEQ ID NO: 2183 - DNA, 19 bp, Artificial Sequence
  Detection oligonucleotide for FHIT
tttaagtatcgattttagt

SEQ ID NO: 2184 - DNA, 21 bp, Artificial Sequence
  Detection oligonucleotide for FHIT
taagtattgattttagtttta

SEQ ID NO: 2185 - DNA, 16 bp, Artificial Sequence
  Detection oligonucleotide for SFN
tttatagcgttcggtt

SEQ ID NO: 2186 - DNA, 17 bp, Artificial Sequence
  Detection oligonucleotide for SFN
atagtgtttggtttgtt

SEQ ID NO: 2187 - DNA, 16 bp, Artificial Sequence
  Detection oligonucleotide for TERT
aggtgtacggtttcgt

SEQ ID NO: 2188 - DNA, 16 bp, Artificial Sequence
  Detection oligonucleotide for TERT
aggtgtatggttttgt

SEQ ID NO: 2189 - DNA, 19 bp, Artificial Sequence
  Detection oligonucleotide for STAT1
atatgatttcggaatttta

SEQ ID NO: 2190 - DNA, 20 bp, Artificial Sequence
  Detection oligonucleotide for STAT1
atatgattttggaattttaa

SEQ ID NO: 2191 - DNA, 16 bp, Artificial Sequence
  Detection oligonucleotide for CDH1
aggtatcgtttttcgt

SEQ ID NO: 2192 - DNA, 18 bp, Artificial Sequence
  Detection oligonucleotide for CDH1
gaggtattgttttttgta

SEQ ID NO: 2193 - DNA, 16 bp, Artificial Sequence
  Detection oligonucleotide for SEQ ID NO:2
taggggttcgattagg

SEQ ID NO: 2194 - DNA, 16 bp, Artificial Sequence
  Detection oligonucleotide for SEQ ID NO:2
aggggtttgattaggg

SEQ ID NO: 2195 - DNA, 16 bp, Artificial Sequence
  Detection oligonucleotide for ESR1
agatcgtgttttcgta

SEQ ID NO: 2196 - DNA, 17 bp, Artificial Sequence
  Detection oligonucleotide for ESR1
attgtgtttttgtaggg

SEQ ID NO: 2197 - DNA, 16 bp, Artificial Sequence
  Detection oligonucleotide for IL6
agatgtcgtcgaggat

SEQ ID NO: 2198 - DNA, 17 bp, Artificial Sequence
  Detection oligonucleotide for IL6
atgttgttgaggatgta

SEQ ID NO: 2199 - DNA, 17 bp, Artificial Sequence
  Detection oligonucleotide for SNCG
tatcggggatagtcgtt

SEQ ID NO: 2200 - DNA, 17 bp, Artificial Sequence
  Detection oligonucleotide for SNCG
tattggggatagttgtt

SEQ ID NO: 2201 - DNA, 16 bp, Artificial Sequence
  Detection oligonucleotide for SNCG
tatcggcgttaatagg

SEQ ID NO: 2202 - DNA, 18 bp, Artificial Sequence
  Detection oligonucleotide for SNCG
tattggtgttaataggag

SEQ ID NO: 2203 - DNA, 16 bp, Artificial Sequence
  Detection oligonucleotide for SNCG
attgtacgtagggttg

SEQ ID NO: 2204 - DNA, 18 bp, Artificial Sequence
  Detection oligonucleotide for SNCG
ttttattgtatgtagggt

SEQ ID NO: 2205 - DNA, 16 bp, Artificial Sequence
  Detection oligonucleotide for SEQ ID NO:15
aataggcgatgtacgg

SEQ ID NO: 2206 - DNA, 16 bp, Artificial Sequence
  Detection oligonucleotide for SEQ ID NO:15
taggtgatgtatgggt

SEQ ID NO: 2207 - DNA, 16 bp, Artificial Sequence
  Detection oligonucleotide for SEQ ID NO:15
taatcgagtttagcgg

SEQ ID NO: 2208 - DNA, 18 bp, Artificial Sequence
  Detection oligonucleotide for SEQ ID NO:15
ttaattgagtttagtggt

SEQ ID NO: 2209 - DNA, 16 bp, Artificial Sequence
  Detection oligonucleotide for SEQ ID NO:36
ttatttgcgtttcgaa

SEQ ID NO: 2210 - DNA, 19 bp, Artificial Sequence
  Detection oligonucleotide for SEQ ID NO:36
aattatttgtgttttgaat

SEQ ID NO: 2211 - DNA, 16 bp, Artificial Sequence
  Detection oligonucleotide for HOXB13
ttcgtagaatcgaagt

SEQ ID NO: 2212 - DNA, 19 bp, Artificial Sequence
  Detection oligonucleotide for HOXB13
taatttgtagaattgaagt

SEQ ID NO: 2213 - DNA, 16 bp, Artificial Sequence
  Detection oligonucleotide for HOXB13
ttacgattgagcgtat

SEQ ID NO: 2214 - DNA, 18 bp, Artificial Sequence
  Detection oligonucleotide for HOXB13
tatgattgagtgtatagg

SEQ ID NO: 2215 - DNA, 16 bp, Artificial Sequence
  Detection oligonucleotide for LMX1A
ttcgtttttaacgtgg

SEQ ID NO: 2216 - DNA, 18 bp, Artificial Sequence
  Detection oligonucleotide for LMX1A
tttgtttttaatgtggtt

SEQ ID NO: 2217 - DNA, 16 bp, Artificial Sequence
  Detection oligonucleotide for SEQ ID NO:2
tgtcgtacgttatgtt

SEQ ID NO: 2218 - DNA, 17 bp, Artificial Sequence
  Detection oligonucleotide for SEQ ID NO:2
ggtgttgtatgttatgt

SEQ ID NO: 2219 - DNA, 16 bp, Artificial Sequence
  Detection oligonucleotide for PGR
ttcgacgaaaagacgt

SEQ ID NO: 2220 - DNA, 18 bp, Artificial Sequence
  Detection oligonucleotide for PGR
tttttgatgaaaagatgt

SEQ ID NO: 2221 - DNA, 16 bp, Artificial Sequence
  Detection oligonucleotide for RTTN
tagattgacgggacga

SEQ ID NO: 2222 - DNA, 17 bp, Artificial Sequence
  Detection oligonucleotide for RTTN
tagattgatgggatgag

SEQ ID NO: 2223 - DNA, 16 bp, Artificial Sequence
  chemically treated genomic DNA (Homo sapiens)
ctacctccaccgcgac

SEQ ID NO: 2224 - DNA, 18 bp, Artificial Sequence
  chemically treated genomic DNA (Homo sapiens)
aagcgttttttagagcgc

SEQ ID NO: 2225 - DNA, 23 bp, Artificial Sequence
  chemically treated genomic DNA (Homo sapiens)
tacgtcgttgcgcgtttttgtgc

SEQ ID NO: 2226 - DNA, 25 bp, Artificial Sequence
  chemically treated genomic DNA (Homo sapiens)
ctatacctactactaacgacgacga

SEQ ID NO: 2227 - DNA, 22 bp, Artificial Sequence
  chemically treated genomic DNA (Homo sapiens)
gcgggtagttgagagtcgggtc

SEQ ID NO: 2228 - DNA, 18 bp, Artificial Sequence
  chemically treated genomic DNA (Homo sapiens)
tcgtcgtcggagcgggcg

SEQ ID NO: 2229 - DNA, 18 bp, Artificial Sequence
  chemically treated genomic DNA (Homo sapiens)
tttaactctccccgacga

SEQ ID NO: 2230 - DNA, 20 bp, Artificial Sequence
  chemically treated genomic DNA (Homo sapiens)
tgtttattcgagtaggacgc

SEQ ID NO: 2231 - DNA, 16 bp, Artificial Sequence
  chemically treated genomic DNA (Homo sapiens)
aaaaaccgaacccccg

SEQ ID NO: 2232 - DNA, 24 bp, Artificial Sequence
  chemically treated genomic DNA (Homo sapiens)
ttatttttgtacggttagtagtcg

SEQ ID NO: 2233 - DNA, 26 bp, Artificial Sequence
  chemically treated genomic DNA (Homo sapiens)
aggataaaggttcggtgttatcgcgg

SEQ ID NO: 2234 - DNA, 20 bp, Artificial Sequence
  chemically treated genomic DNA (Homo sapiens)
aaacctaaatacaacgacgc

SEQ ID NO: 2235 - DNA, 23 bp, Artificial Sequence
  chemically treated genomic DNA (Homo sapiens)
agtttttagtttcggtttaggtc

SEQ ID NO: 2236 - DNA, 19 bp, Artificial Sequence
  chemically treated genomic DNA (Homo sapiens)
ggcgagggaagttaagaac

SEQ ID NO: 2237 - DNA, 19 bp, Artificial Sequence
  chemically treated genomic DNA (Homo sapiens)
catttaacaaaccgaacga

SEQ ID NO: 2238 - DNA, 31 bp, Artificial Sequence
  chemically treated genomic DNA (Homo sapiens)
ttttaggaaatttcggttcgttttacgtcgg

SEQ ID NO: 2239 - DNA, 17 bp, Artificial Sequence
  chemically treated genomic DNA (Homo sapiens)
gaaggaaatttaggcgg

SEQ ID NO: 2240 - DNA, 15 bp, Artificial Sequence
  chemically treated genomic DNA (Homo sapiens)
cgcgtaaaccctacg

SEQ ID NO: 2241 - DNA, 30 bp, Artificial Sequence
  chemically treated genomic DNA (Homo sapiens)
cgtagaacgagtatagggttttgtgagggc

SEQ ID NO: 2242 - DNA, 24 bp, Artificial Sequence
  chemically treated genomic DNA (Homo sapiens)
cgcacttaaaataaaaacactacg

SEQ ID NO: 2243 - DNA, 22 bp, Artificial Sequence
  chemically treated genomic DNA (Homo sapiens)
tgttgtgttacgaggtggattc

SEQ ID NO: 2244 - DNA, 20 bp, Artificial Sequence
  chemically treated genomic DNA (Homo sapiens)
cgtagggtcgtgcgggatcg

SEQ ID NO: 2245 - DNA, 26 bp, Artificial Sequence
  chemically treated genomic DNA (Homo sapiens)
ccacctcgataaattaaaaaataaac

SEQ ID NO: 2246 - DNA, 20 bp, Artificial Sequence
  chemically treated genomic DNA (Homo sapiens)
agtaggcgtgtaagggtttc

SEQ ID NO: 2247 - DNA, 24 bp, Artificial Sequence
  chemically treated genomic DNA (Homo sapiens)
cggcggttttttgttcgggttgtc

SEQ ID NO: 2248 - DNA, 20 bp, Artificial Sequence
  chemically treated genomic DNA (Homo sapiens)
cccgactaaaacgtaccaac

SEQ ID NO: 2249 - DNA, 26 bp, Artificial Sequence
  chemically treated genomic DNA (Homo sapiens)
ttttagatgaagtcgttatagaggtc

SEQ ID NO: 2250 - DNA, 19 bp, Artificial Sequence
  chemically treated genomic DNA (Homo sapiens)
cgtgtgcgtggcgggtttc

SEQ ID NO: 2251 - DNA, 17 bp, Artificial Sequence
  chemically treated genomic DNA (Homo sapiens)
cggttgttgtaggcgtc

SEQ ID NO: 2252 - DNA, 18 bp, Artificial Sequence
  chemically treated genomic DNA (Homo sapiens)
gcaaaacacacgaaaacg

SEQ ID NO: 2253 - DNA, 20 bp, Artificial Sequence
  chemically treated genomic DNA (Homo sapiens)
cgcgtgtgtaggtcgcgcgt

SEQ ID NO: 2254-2255 - skipped (2 entries)

SEQ ID NO: 2256 - DNA, 20 bp, Artificial Sequence
  chemically treated genomic DNA (Homo sapiens)
aaaatcctctccaacacgtc

SEQ ID NO: 2257 - DNA, 20 bp, Artificial Sequence
  chemically treated genomic DNA (Homo sapiens)
cgcgattcgttgtttattag

SEQ ID NO: 2258 - DNA, 25 bp, Artificial Sequence
  chemically treated genomic DNA (Homo sapiens)
cggatttcgcggttaacgcgtagtt

SEQ ID NO: 2259 - DNA, 20 bp, Artificial Sequence
  chemically treated genomic DNA (Homo sapiens)
ccaaaacctaaacttacaac

SEQ ID NO: 2260 - DNA, 17 bp, Artificial Sequence
  chemically treated genomic DNA (Homo sapiens)
ggaaatttgaggggtaa

SEQ ID NO: 2261 - DNA, 17 bp, Artificial Sequence
  chemically treated genomic DNA (Homo sapiens)
ggcgatcgaggcgtcgt

SEQ ID NO: 2262 - DNA, 16 bp, Artificial Sequence
  chemically treated genomic DNA (Homo sapiens)
gcgggtggggagcgag

SEQ ID NO: 2263 - DNA, 31 bp, Artificial Sequence
  chemically treated genomic DNA (Homo sapiens)
tacaacaccaccaacaaacccaaaaacacaa

SEQ ID NO: 2264 - DNA, 16 bp, Artificial Sequence
  chemically treated genomic DNA (Homo sapiens)
ctacctccaccgcgac

SEQ ID NO: 2265 - DNA, 18 bp, Artificial Sequence
  chemically treated genomic DNA (Homo sapiens)
aagcgttttttagagcgc

SEQ ID NO: 2266 - DNA, 23 bp, Artificial Sequence
  chemically treated genomic DNA (Homo sapiens)
tacgtcgttgcgcgtttttgtgc

SEQ ID NO: 2267 - DNA, 28 bp, Artificial Sequence
  chemically treated genomic DNA (Homo sapiens)
tgttatttagacgtttacgaataagttc

SEQ ID NO: 2268 - DNA, 26 bp, Artificial Sequence
  chemically treated genomic DNA (Homo sapiens)
atctatccgtcaatacttataaatcg

SEQ ID NO: 2269 - DNA, 25 bp, Artificial Sequence
  chemically treated genomic DNA (Homo sapiens)
cgtttttcgcggttttggggaattc

SEQ ID NO: 2270 - DNA, 19 bp, Artificial Sequence
  chemically treated genomic DNA (Homo sapiens)
acacccgtaaactccttcg

SEQ ID NO: 2271 - DNA, 22 bp, Artificial Sequence
  chemically treated genomic DNA (Homo sapiens)
atttttagcgagtcgagttttc

SEQ ID NO: 2272 - DNA, 23 bp, Artificial Sequence
  chemically treated genomic DNA (Homo sapiens)
cggtaagcgttcgaaagtcgggt

SEQ ID NO: 2273 - DNA, 21 bp, Artificial Sequence
  chemically treated genomic DNA (Homo sapiens)
aaatacaaaaacgaaaaaccg

SEQ ID NO: 2274 - DNA, 20 bp, Artificial Sequence
  chemically treated genomic DNA (Homo sapiens)
gaggcgtttgagagattttc

SEQ ID NO: 2275 - DNA, 16 bp, Artificial Sequence
  chemically treated genomic DNA (Homo sapiens)
gcggaacggcgcgtga

SEQ ID NO: 2276 - DNA, 19 bp, Artificial Sequence
  chemically treated genomic DNA (Homo sapiens)
ggcgagggaagttaagaac

SEQ ID NO: 2277 - DNA, 19 bp, Artificial Sequence
  chemically treated genomic DNA (Homo sapiens)
catttaacaaaccgaacga

SEQ ID NO: 2278 - DNA, 31 bp, Artificial Sequence; identical to SEQ ID NO: 2238
  chemically treated genomic DNA (Homo sapiens)

SEQ ID NO: 2279 - DNA, 21 bp, Artificial Sequence
  chemically treated genomic DNA (Homo sapiens)
aaggatttgggatttacgatc

SEQ ID NO: 2280 - DNA, 20 bp, Artificial Sequence
  chemically treated genomic DNA (Homo sapiens)
ccgccctcctaaaactctac

SEQ ID NO: 2281 - DNA, 20 bp, Artificial Sequence
  chemically treated genomic DNA (Homo sapiens)
cgtaggtagcggcgggggcg

SEQ ID NO: 2282 - DNA, 22 bp, Artificial Sequence
  chemically treated genomic DNA (Homo sapiens)
aaactccgaaaactaaaaaacg

SEQ ID NO: 2283 - DNA, 24 bp, Artificial Sequence
  chemically treated genomic DNA (Homo sapiens)
agtgagtagagtttagagtcgtgc

SEQ ID NO: 2284 - DNA, 24 bp, Artificial Sequence
  chemically treated genomic DNA (Homo sapiens)
cgcgttcgtttcgtgtattttcgc

SEQ ID NO: 2285 - DNA, 28 bp, Artificial Sequence
  chemically treated genomic DNA (Homo sapiens)
cacaaactatctataaaaaattaatctc

SEQ ID NO: 2286 - DNA, 23 bp, Artificial Sequence
  chemically treated genomic DNA (Homo sapiens)
gattgttgttggtgtttgttatt

SEQ ID NO: 2287 - DNA, 22 bp, Artificial Sequence
  chemically treated genomic DNA (Homo sapiens)
tcgtctcttaaaccgctttcga

SEQ ID NO: 2288 - DNA, 25 bp, Artificial Sequence
  chemically treated genomic DNA (Homo sapiens)
cctcaaaataaacacgaacataccc

SEQ ID NO: 2289 - DNA, 23 bp, Artificial Sequence
  chemically treated genomic DNA (Homo sapiens)
ttaaaactaaacgaccaaaaacg

SEQ ID NO: 2290 - DNA, 23 bp, Artificial Sequence
  chemically treated genomic DNA (Homo sapiens)
ggaggttagttattttcggagtc

SEQ ID NO: 2291 - DNA, 27 bp, Artificial Sequence
  chemically treated genomic DNA (Homo sapiens)
cgtttagcgtttggggacgtcgatttc

SEQ ID NO: 2292 - DNA, 17 bp, Artificial Sequence
  chemically treated genomic DNA (Homo sapiens)
tttggagaaagagggat

SEQ ID NO: 2293 - DNA, 20 bp, Artificial Sequence
  chemically treated genomic DNA (Homo sapiens)
aaaatcaaaaattacacctc

SEQ ID NO: 2294 - DNA, 22 bp, Artificial Sequence
  chemically treated genomic DNA (Homo sapiens)
cggaattgtagagcgtcggtta

SEQ ID NO: 2295 - DNA, 22 bp, Artificial Sequence
  chemically treated genomic DNA (Homo sapiens)
gttttttttttcgcgaacgtcg

SEQ ID NO: 2296 - DNA, 26 bp, Artificial Sequence
  chemically treated genomic DNA (Homo sapiens)
acctcccaccctccactcaacattca

SEQ ID NO: 2297 - DNA, 47 bp, Artificial Sequence
  chemically treated genomic DNA (Homo sapiens)
ctcaaacacaaaaaaattaacatctcatctcttaaaccactttcaat

1. A method for detecting, or for detecting and distinguishing between or among breast cell proliferative disorders in a subject, comprising
determining the expression of at least one gene or sequence selected from the group consisting of SEQ ID NO: 1, SEQ ID NO: 2, SEQ ID NO: 3, SEQ ID NO: 4, SEQ ID NO: 5, SEQ ID NO: 6, SEQ ID NO: 7, SEQ ID NO: 8, SEQ ID NO: 9, PROSTAGLANDIN E2 RECEPTOR, EP4 SUBTYPE (PROSTANOID EP4 RECEPTOR) (PGE RECEPTOR, EP4 SUBTYPE), ORPHAN NUCLEAR RECEPTOR NR5A2 (ALPHA-1-FETOPROTEIN TRANSCRIPTION FACTOR) (HEPATOCYTIC TRANSCRIPTION FACTOR) (B1-BINDING FACTOR) (HB1F) (CYP7A PROMOTER BINDING FACTOR), LIM DOMAIN KINASE 1, MSF, SEQ ID NO: 14, SEQ ID NO: 15, SEQ ID NO: 16, SEQ ID NO: 17, SEQ ID NO: 18, SEQ ID NO: 19, PRDM6, RAP2B, NR2E1, PCDH7, DKK3, RTTN, SEQ ID NO: 26, GIRK2, SEQ ID NO: 28, SEQ ID NO: 29, ARL7, SEQ ID NO: 31, THH, SNAP25, HOXB13, SEQ ID NO: 35, SEQ ID NO: 36, MGC10561, LMX1A, SENP3, GS1, TITF1, SEQ ID NO: 42, DDX51, Q8NAN2, SEQ ID NO: 45, SEQ ID NO: 46, O60279, SEQ ID NO: 48, KOX7, BCL11B, SEQ ID NO: 51, MGC34831, COL5A1, SEQ ID NO: 54, PDLIM1, BRCA2, CDKN2A, EYA4, GSTP1, SYK, AR, PLAU, LEF1, ALX4, APC, BRCA1, CDKN1A, SERPINB5, SFN, CDH13, CASP8, PRSS8, SNCG, IGSF4, ESR1, FHIT, FABP3, HOXA5, CDH1, TP53, THBS1, APAF1, PGR, TMS1/ASC, HIC1, TP73, CLDN7, RARB, MLH1, RASSF1A, ESR2, TERT, TGFBR2, IGFBP7, LOT1, S100A7, ARH1/NOEY2, DAPK1, IL6, TWIST, MCT1, SASH1, TIMP3, CCND2, SOD2, THRB, NME1, RARA, STAT1, TPM1, GJB2, SLIT2, HS3ST2, PRDM2, SCGB3A1, SLC19A1, SEQ ID NO: 117, and GPC3 and
determining therefrom the presence, absence or subclass of a breast cell proliferative disorder.

2. The method according to claim 1, wherein the presence or absence of breast cancer is determined and wherein the at least one gene or sequence comprises, or hybridizes under stringent conditions to a sequence of at least 16 contiguous nucleotides of at least one gene or sequence selected from the group consisting of APC, ARH1/NOEY2, BRCA2, CCND2, CDKN1A, CDKN2A, SEQ ID NO: 9, DAPK1, SEQ ID NO: 2, EYA4, FHIT, GSTP1, HIC1, IGFBP7, MLH1, PGR, SERPINB5, RARB, SFN, SOD2, TGFBR2, THRB, TIMP3, TP73, NME1, CDH13, THBS1, TMS1/ASC, ESR1, IL6, APAF1, CASP8, SYK, HOXA5, FABP3, RASSF1A, SEQ ID NO: 3, RARA, TWIST, ESR2, PLAU, STAT1, SEQ ID NO: 4, BRCA1, LOT1, PRSS8, SNCG, TPM1, GPC3, CLDN7, SLC19A1, GJB2, SLIT2, IGSF4, MCT1, HS3ST2, PRDM2, ALX4, SEQ ID NO: 5, SEQ ID NO: 6, SEQ ID NO: 7, SEQ ID NO: 8, SCGB3A1, SEQ ID NO: 1, PROSTAGLANDIN E2 RECEPTOR, EP4 SUBTYPE (PROSTANOID EP4 RECEPTOR) (PGE RECEPTOR, EP4 SUBTYPE), ORPHAN NUCLEAR RECEPTOR NR5A2 (ALPHA-1-FETOPROTEIN TRANSCRIPTION FACTOR) (HEPATOCYTIC TRANSCRIPTION FACTOR) (B1-BINDING FACTOR) (HB1F) (CYP7A PROMOTER BINDING FACTOR), LIM DOMAIN KINASE 1, SASH1, S100A7, BCL11B, SEQ ID NO: 51, MGC34831, SEQ ID NO: 54, PDLIM1, MSF, SEQ ID NO: 14, SEQ ID NO: 15, SEQ ID NO: 16, SEQ ID NO: 17, SEQ ID NO: 18, SEQ ID NO: 19, PRDM6, RAP2B, NR2E1, PCDH7, DKK3, RTTN, SNAP25, SEQ ID NO: 26, GIRK2, SEQ ID NO: 28, SEQ ID NO: 29, ARL7, SEQ ID NO: 31, THH, HOXB13, SEQ ID NO: 35, MGC10561, LMX1A, SENP3, GS1, TITF1, SEQ ID NO: 42, DDX51, SEQ ID NO: 117, SEQ ID NO: 45, SEQ ID NO: 46, O60279, and SEQ ID NO: 48.

3. The method according to claim 2, wherein the at least one gene or sequence comprises, or hybridizes under stringent conditions to a sequence of at least 16 contiguous nucleotides of at least one gene or sequence selected from the group consisting of PRDM2, PLAU, GSTP1, SLIT2, CCND2, HOXA5, RASSF1A, HS3ST2, ARH1/NOEY2, SCGB3A1, LIMK-1, SEQ ID NO: 6, SEQ ID NO: 3, SEQ ID NO: 18, SEQ ID NO: 7, SEQ ID NO: 41, SEQ ID NO: 22, SEQ ID NO: 46, SEQ ID NO: 13 and SEQ ID NO: 31.

4. The method according to claim 1, wherein said breast cell proliferative disorder is breast cancer that is differentiated from other cancers, and wherein said at least one gene or sequence comprises, or hybridizes under stringent conditions to a sequence of at least 16 contiguous nucleotides of at least one gene or sequence selected from the group consisting of ARH1/NOEY2, CCND2, CDKN1A, CDKN2A, DAPK1, SEQ ID NO: 2, EYA4, FHIT, GSTP1, HIC1, IGFBP7, SERPINB5, TERT, TGFBR2, THRB, TIMP3, TP73, NME1, CDH13, THBS1, TMS1/ASC, IL6, APAF1, SYK, HOXA5, FABP3, RASSF1A, SEQ ID NO: 3, TWIST, ESR2, PLAU, STAT1, SEQ ID NO: 4, LOT1, GPC3, CLDN7, GJB2, SLIT2, IGSF4, MCT1, PRDM2, ALX4, SEQ ID NO: 5, SEQ ID NO: 6, SEQ ID NO: 8, SCGB3A1, SEQ ID NO: 1, PROSTAGLANDIN E2 RECEPTOR, EP4 SUBTYPE (PROSTANOID EP4 RECEPTOR) (PGE RECEPTOR, EP4 SUBTYPE), LIM DOMAIN KINASE 1, MGC34831, SEQ ID NO: 54, MSF, SEQ ID NO: 16, SEQ ID NO: 17, SEQ ID NO: 18, SEQ ID NO: 19, PRDM6, NR2E1, PCDH7, RTTN, SNAP25, SEQ ID NO: 26, SEQ ID NO: 28, ARL7, SEQ ID NO: 31, THH, HOXB13, SEQ ID NO: 35, MGC10561, LMX1A, SENP3, TITF1, SEQ ID NO: 42, DDX51, SEQ ID NO: 45, O60279, and SEQ ID NO: 48.

5. The method according to claim 4, wherein said at least one gene or sequence comprises, or hybridizes under stringent conditions to a sequence of at least 16 contiguous nucleotides of at least one gene or sequence selected from the group consisting of PRDM2, GSTP1, ALX4, HOXA5, PLAU, RASSF1A, IGSF4, SLIT2, DAPK1, CDKN1A, SEQ ID NO: 38, SEQ ID NO: 35, LIMK-1, SEQ ID NO: 39, SEQ ID NO: 10, SEQ ID NO: 26, SEQ ID NO: 8, SEQ ID NO: 22, SEQ ID NO: 18 and SEQ ID NO: 47.

6. The method according to claim 1, wherein the presence or absence of breast cancer is determined in a background of blood or components thereof and wherein the at least one gene or sequence comprises, or hybridizes under stringent conditions to a sequence of at least 16 contiguous nucleotides of at least one gene or sequence selected from the group consisting of APC, ARH1/NOEY2, CCND2, CDH1, CDKN1A, CDKN2A, SEQ ID NO: 9, DAPK1, SEQ ID NO: 2, EYA4, FHIT, GSTP1, HIC1, IGFBP7, PGR, SERPINB5, RARB, SFN, SOD2, TERT, TGFBR2, THRB, TIMP3, NME1, CDH13, THBS1, TMS1/ASC, ESR1, IL6, APAF1, CASP8, SYK, HOXA5, FABP3, RASSF1A, SEQ ID NO: 3, TWIST, ESR2, PLAU, STAT1, SEQ ID NO: 4, BRCA1, LOT1, PRSS8, SNCG, GPC3, CLDN7, SLC19A1, GJB2, SLIT2, IGSF4, MCT1, HS3ST2, PRDM2, ALX4, SEQ ID NO: 5, SEQ ID NO: 6, SEQ ID NO: 7, SEQ ID NO: 8, SCGB3A1, SEQ ID NO: 1, PROSTAGLANDIN E2 RECEPTOR, EP4 SUBTYPE (PROSTANOID EP4 RECEPTOR) (PGE RECEPTOR, EP4 SUBTYPE), ORPHAN NUCLEAR RECEPTOR NR5A2 (ALPHA-1-FETOPROTEIN TRANSCRIPTION FACTOR) (HEPATOCYTIC TRANSCRIPTION FACTOR) (B1-BINDING FACTOR) (HB1F) (CYP7A PROMOTER BINDING FACTOR), LIM DOMAIN KINASE 1, SASH1, S100A7, BCL 11B, SEQ ID NO: 51, MGC34831, SEQ ID NO: 54, PDLIM1, MSF, SEQ ID NO: 14, SEQ ID NO: 15, SEQ ID NO: 16, SEQ ID NO: 17, SEQ ID NO: 18, SEQ ID NO: 19, PRDM6, RAP2B, NR2E1, PCDH7, DKK3, RTTN, SNAP25, SEQ ID NO: 26, GIRK2, SEQ ID NO: 28, SEQ ID NO: 29, ARL7, SEQ ID NO: 31, THH, HOXB13, SEQ ID NO: 35, SEQ ID NO: 36, MGC10561, LMX1A, SENP3, GS1, TITF1, SEQ ID NO: 42, DDX51, SEQ ID NO: 117, SEQ ID NO: 46, O60279, and SEQ ID NO: 48.

7. The method according to claim 6, wherein said at least one gene or sequence comprises, or hybridizes under stringent conditions to a sequence of at least 16 contiguous nucleotides of at least one gene or sequence selected from the group consisting of FABP3, RASSF1A, MSF, PRDM6, LMX1A, SEQ ID NO: 4, SCGB3A1, SLIT2, NR2E1, EYA4, PRDM2, SERPINB5, TWIST, STAT1, ALX4, IGFBP7, DAPK1, THBS1, PLAU, SEQ ID NO: 20, SEQ ID NO: 38, SEQ ID NO: 8, SEQ ID NO: 37, SEQ ID NO: 10, SEQ ID NO: 35, SEQ ID NO: 47, SEQ ID NO: 6, LIMK-1 and SEQ ID NO: 46.

8. The method according to claim 1, wherein ductal carcinoma in-situ is differentiated from healthy breast tissue or benign breast cell proliferative disorders and wherein said at least one gene or sequence comprises, or hybridizes under stringent conditions to a sequence of at least 16 contiguous nucleotides of at least one gene or sequence selected from the group consisting of APC, ARH1/NOEY2, CCND2, CDKN1A, CDKN2A, SEQ ID NO: 9, SEQ ID NO: 2, EYA4, FHIT, GSTP1, HIC1, IGFBP7, MLH1, PGR, SERPINB5, RARB, SOD2, TERT, TGFBR2, THRB, TIMP3, TP73, CDH13, THBS1, TMS1/ASC, ESR1, APAF1, CASP8, SYK, HOXA5, FABP3, RASSF1A, SEQ ID NO: 3, RARA, TWIST, ESR2, PLAU, SEQ ID NO: 4, SNCG, SLC19A1, GJB2, SLIT2, IGSF4, MCT1, HS3ST2, PRDM2, SEQ ID NO: 6, SEQ ID NO: 7, SEQ ID NO: 8, SCGB3A1, PROSTAGLANDIN E2 RECEPTOR, EP4 SUBTYPE (PROSTANOID EP4 RECEPTOR) (PGE RECEPTOR, EP4 SUBTYPE), ORPHAN NUCLEAR RECEPTOR NR5A2 (ALPHA-1-FETOPROTEIN TRANSCRIPTION FACTOR) (HEPATOCYTIC TRANSCRIPTION FACTOR) (B1-BINDING FACTOR) (HB1F) (CYP7A PROMOTER BINDING FACTOR), LIM DOMAIN KINASE1, SASH1, S100A7, BCL 11B, SEQ ID NO: 51, MGC34831, SEQ ID NO: 54, PDLIM1, MSF, SEQ ID NO: 14, SEQ ID NO: 16, SEQ ID NO: 17, SEQ ID NO: 18, SEQ ID NO: 19, NR2E1, PCDH7, DKK3, RTTN, SNAP25, GIRK2, SEQ ID NO: 28, SEQ ID NO: 29, ARL7, SEQ ID NO: 31, THH, HOXB13, SEQ ID NO: 36, LMX1A, SENP3, TITF1, SEQ ID NO: 42, DDX51, SEQ ID NO: 117, SEQ ID NO: 46, O60279, and SEQ ID NO: 48.

9. The method according to claim 8, wherein said at least one gene or sequence comprises, or hybridizes under stringent conditions to a sequence of at least 16 contiguous nucleotides of at least one gene or sequence selected from the group consisting of HS3ST2, SLIT2, RASSF1A, GSTP1, GJB2, IGFBP7, CDH13, ARH1/NOEY2, SCGB3A1, FHIT, SEQ ID NO: 27, LIMK-1, SEQ ID NO: 46, SEQ ID NO: 3, SEQ ID NO: 117, SEQ ID NO: 48, SEQ ID NO: 41, SEQ ID NO: 4, SEQ ID NO: 6, and SEQ ID NO: 24.

10. The method according to claim 1, wherein breast cancer is differentiated from healthy breast tissue or benign breast cell proliferative disorders and wherein said at least one gene or sequence comprises, or hybridizes under stringent conditions to a sequence of at least 16 contiguous nucleotides of at least one gene or sequence selected from the group consisting of ARH1/NOEY2, CCND2, CDKN1A, CDKN2A, SEQ ID NO: 9, DAPK1, SEQ ID NO: 2, EYA4, FHIT, GSTP1, HIC1, IGFBP7, SERPINB5, TERT, TGFBR2, THRB, TIMP3, TP73, NME1, CDH13, THBS1, TMS1/ASC, IL6, APAF1, SYK, HOXA5, FABP3, RASSF1A, SEQ ID NO: 3, TWIST, ESR2, PLAU, STAT1, SEQ ID NO: 4, LOT1, GPC3, CLDN7, GJB2, SLIT2, IGSF4, MCT1, PRDM2, ALX4, SEQ ID NO: 5, SEQ ID NO: 6, SEQ ID NO: 7, SEQ ID NO: 8, SCGB3A1, SEQ ID NO: 1, PROSTAGLANDIN E2 RECEPTOR, EP4 SUBTYPE (PROSTANOID EP4 RECEPTOR) (PGE RECEPTOR, EP4 SUBTYPE), ORPHAN NUCLEAR RECEPTOR NR5A2 (ALPHA-1-FETOPROTEIN TRANSCRIPTION FACTOR) (HEPATOCYTIC TRANSCRIPTION FACTOR) (B1-BINDING FACTOR) (HB1F) (CYP7A PROMOTER BINDING FACTOR), LIM DOMAIN KINASE 1, BCL 11B, SEQ ID NO: 51, MGC34831, SEQ ID NO: 54, PDLIM1, MSF, SEQ ID NO: 14, SEQ ID NO: 16, SEQ ID NO: 17, SEQ ID NO: 18, SEQ ID NO: 19, PRDM6, NR2E1, PCDH7, DKK3, RTTN, SNAP25, SEQ ID NO: 26, GIRK2, SEQ ID NO: 28, SEQ ID NO: 29, ARL7, SEQ ID NO: 31, THH, HOXB13, SEQ ID NO: 35, SEQ ID NO: 36, MGC10561, LMX1A, SENP3, GS1, TITF1, SEQ ID NO: 42, DDX51, SEQ ID NO: 117, SEQ ID NO: 45, SEQ ID NO: 46, O60279, and SEQ ID NO: 48.

11. The method according to claim 10, wherein said at least one gene or sequence comprises, or hybridizes under stringent conditions to a sequence of at least 16 contiguous nucleotides of at least one gene or sequence selected from the group consisting of SLIT2, HS3ST2, HOXA5, ARH1/NOEY2, IGFBP7, PLAU, CDH13, TIMP3, CCND2, GSTP1, SEQ ID NO: 117, LIMK-1, SEQ ID NO: 46, SEQ ID NO: 6, SEQ ID NO: 7, SEQ ID NO: 3, SEQ ID NO: 41, SEQ ID NO: 27, SEQ ID NO: 31, and SEQ ID NO: 4.

12. A method for detecting, or for detecting and distinguishing between or among breast cell proliferative disorders in a subject, comprising:
determining the expression of at least one gene or sequence selected from the group consisting of SEQ ID NO: 1, SEQ ID NO: 2, SEQ ID NO: 3, SEQ ID NO: 4, SEQ ID NO: 5, SEQ ID NO: 6, SEQ ID NO: 7, SEQ ID NO: 8, SEQ ID NO: 9, PROSTAGLANDIN E2 RECEPTOR, EP4 SUBTYPE (PROSTANOID EP4 RECEPTOR) (PGE RECEPTOR, EP4 SUBTYPE), ORPHAN NUCLEAR RECEPTOR NR5A2 (ALPHA-1-FETOPROTEIN TRANSCRIPTION FACTOR) (HEPATOCYTIC TRANSCRIPTION FACTOR) (B1-BINDING FACTOR) (HB1F) (CYP7A PROMOTER BINDING FACTOR), LIM DOMAIN KINASE 1, MSF, SEQ ID NO: 14, SEQ ID NO: 15, SEQ ID NO: 16, SEQ ID NO: 17, SEQ ID NO: 18, SEQ ID NO: 19, PRDM6, RAP2B, NR2E1, PCDH7, DKK3, RTTN, SEQ ID NO: 26, GIRK2, SEQ ID NO: 28, SEQ ID NO: 29, ARL7, SEQ ID NO: 31, THH, SNAP25, HOXB13, SEQ ID NO: 35, SEQ ID NO: 36, MGC10561, LMX1A, SENP3, GS1, TITF1, SEQ ID NO: 42, DDX51, Q8NAN², SEQ ID NO: 45, SEQ ID NO: 46, O60279, SEQ ID NO: 48, KOX7, BCL11B, SEQ ID NO: 51, MGC34831, COL5A1, SEQ ID NO: 54, PDLIM1, BRCA2, CDKN2A, EYA4, GSTP1, SYK, AR, PLAU, LEF1, ALX4, APC, BRCA1, CDKN1A, SERPINB5, SFN, CDH13, CASP8, PRSS8, SNCG, IGSF4, ESR1, FHIT, FABP3, HOXA5, CDH1, TP53, THBS1, APAF1, PGR, TMS1/ASC, HIC1, TP73, CLDN7, RARB, MLH1, RASSF1A, ESR2, TERT, TGFBR2, IGFBP7, LOT1, S100A7, ARH1/NOEY2, DAPK1, IL6, TWIST, MCT1, SASH1, TIMP3, CCND2, SOD2, THRB, NME1, RARA, STAT1, TPM1, GJB2, SLIT2, HS3ST2, PRDM2, SCGB3A1, SLC19A1, SEQ ID NO: 117, and GPC3; and
determining therefrom the presence, absence or subclass of a breast cell proliferative disorder wherein said expression is determined by analysis of CpG methylation.

13. The method according to claim 12, comprising contacting genomic DNA isolated from a biological sample obtained from a subject, with at least one reagent, or series of reagents that distinguishes between methylated and non-methylated CpG dinucleotides within one or more of said target nucleic acids.

14. A method for detecting, or for detecting and distinguishing between or among breast cell proliferative disorders in a subject, comprising:
i) obtaining, from a subject, a biological sample having subject genomic DNA;
ii) contacting the genomic DNA, or a fragment thereof, with one reagent or a plurality of reagents for distinguishing between methylated and non methylated CpG dinucleotide sequences;
iii) amplifying at least one target sequence of the DNA by means of at least one primer pair whose sequences are reverse complementary, identical, or hybridize under stringent or highly stringent conditions to an at least 16-base-pair long segment of a base sequence selected from the group consisting of SEQ ID NO: 493 to SEQ ID NO: 964 and sequences complementary thereto; and
iv) determining, based at least in part on said distinguishing, the methylation state of at least one target CpG dinucleotide sequence, or an average, or a value reflecting an average methylation state of a plurality of target CpG dinucleotide sequences, whereby detecting, or detecting and distinguishing between or among breast cell proliferative disorders is, at least in part, afforded.

15. The method of claim 14 wherein ii) comprises use of a reagent selected from the group consisting of bisulfite, hydrogen sulfite, disulfite, and combinations thereof.

16. The method of claim 14, wherein said biological sample is selected form the group consisting nipple aspirate fluid, lymphatic fluid, ductal lavage fluid, fine needle aspirate, blood plasma, blood serum, whole blood, isolated blood cells, cells isolated from the blood.

17. The method of claim 14, comprising use of at least one nucleic acid molecule or peptide nucleic acid (PNA) molecule comprising, in each case a contiguous sequence at least 9 nucleotides in length that is complementary to, or hybridizes under moderately stringent or stringent conditions to a sequence selected from the group the group consisting of SEQ ID NO: 493 to SEQ ID NO: 964.

18. (canceled)

19. (canceled)

20. The method of claim 14, wherein amplifying in iii) comprises use of at least one method selected from the group consisting of: use of a heat-resistant DNA polymerase as the amplification enzyme; use of a polymerase lacking 5′-3′ exonuclease activity; use of a polymerase chain reaction (PCR); generation of a amplificate nucleic acid molecule carrying a detectable labels; and combinations thereof.

21. The method of claim 14, wherein amplifying in iii) comprises use of methylation specific primers.

22. The method according to claim 14, further comprising in iii) the use of at least one nucleic acid molecule or peptide nucleic acid molecule comprising in each case a contiguous sequence at least 9 nucleotides in length that is complementary to, or hybridizes under moderately stringent or stringent conditions to a sequence selected from the group consisting of SEQ ID NO: 493 to SEQ ID NO: 964 and complements thereof, wherein said nucleic acid molecule or peptide nucleic acid molecule suppresses amplification of the nucleic acid to which it is hybridized.

23. The method according to claim 14, wherein determining in iv) comprises hybridization of at least one nucleic acid molecule or peptide nucleic acid molecule in each case comprising a contiguous sequence at least 9 nucleotides in length that is complementary to, or hybridizes under moderately stringent or stringent conditions to a sequence selected from the group consisting of SEQ ID NO: 493 to SEQ ID NO: 964 and complements thereof.

24. (canceled)

25. (canceled)

26. The method of claim 14, wherein determining in iv), comprises sequencing of the amplificate.

27. A treated nucleic acid derived from SEQ ID NO: 1 TO SEQ ID NO: 118, wherein the treatment is suitable to convert at least one unmethylated cytosine base of the genomic DNA sequence to uracil or another base that is detectably dissimilar to cytosine in terms of hybridization.

28. A nucleic acid, comprising at least 16 contiguous nucleotides of a treated genomic DNA sequence selected from the group consisting of SEQ ID NO: 493 to SEQ ID NO: 964 and sequences complementary thereto.

29. The nucleic acid of claim 25, wherein the contiguous base sequence comprises at least one CpG, TpG or CpA dinucleotide sequence.

30. The nucleic acid of any of claim 24, wherein the treatment comprises use of a reagent selected from the group consisting of bisulfite, hydrogen sulfite, disulfite, and combinations thereof.

31. (canceled)

32. (canceled)

33. (canceled)

34. A kit useful for detecting, or for detecting and distinguishing between or among breast cell proliferative disorders of a subject, comprising:
at least one of a bisulfite reagent, or a methylation-sensitive restriction enzyme; and
at least one nucleic acid molecule or peptide nucleic acid molecule comprising, in each case a contiguous sequence at least 9 nucleotides that is complementary to, or hybridizes under moderately stringent or stringent conditions to a sequence selected from the group consisting of SEQ ID NO: 493 to SEQ ID NO: 964 and complements thereof.

35. The kit of claim 34, further comprising standard reagents for performing a methylation assay selected from the group consisting of MS-SNuPE, MSP, MethyLight, HeavyMethyl, nucleic acid sequencing, and combinations thereof.
